United States Patent Application Publication US 2026/0275352 A1, published September 17, 2026 (application 19/472,268).

The application's sequence listing, which the Patent Office published only in electronic form, follows.

SEQUENCE LISTING (6406 sequences)

SEQ ID NO: 1 - protein, 743 aa, Adeno-associated virus
MAADGYLPDWLEDNLSEGIREWWALKPGAPQPKANQQHQDNARGLVLPGYKYLGPGNGLDKGEPVNAADAAALEHDKAYDQQLKAGDNPYLKYNHADAEFQERLKEDTSFGGNLGRAVFQAKKRLLEPLGLVEEAAKTAPGKKRPVEQSPQEPDSSAGIGKSGAQPAKKRLNFGQTGDTESVPDPQPIGEPPAAPSGVGSLTMASGGGAPVADNNEGADGVGSSSGNWHCDSQWLGDRVITTSTRTWALPTYNNHLYKQISNSTSGGSSNDNAYFGYSTPWGYFDFNRFHCHFSPRDWQRLINNNWGFRPKRLNFKLFNIQVKEVTDNNGVKTIANNLTSTVQVFTDSDYQLPYVLGSAHEGCLPPFPADVFMIPQYGYLTLNDGSQAVGRSSFYCLEYFPSQMLRTGNNFQFSYEFENVPFHSSYAHSQSLDRLMNPLIDQYLYYLSKTINGSGQNQQTLKFSVAGPSNMAVQGRNYIPGPSYRQQRVSTTVTQNNNSEFAWPGASSWALNGRNSLMNPGPAMASHKEGEDRFFPLSGSLIFGKQGTGRDNVDADKVMITNEEEIKTTNPVATESYGQVATNHQSDGTLAVPFKAQAQTGWVQNQGILPGMVWQDRDVYLQGPIWAKIPHTDGNFHPSPLMGGFGMKHPPPQILIKNTPVPADPPTAFNKDKLNSFITQYSTGQVSVEIEWELQKENSKRWNPEIQYTSNYYKSNNVEFAVNTEGVYSEPRPIGTRYLTRNL

SEQ ID NO: 2 - protein, 6 aa, synthetic construct
HDSPHK

SEQ ID NO: 3 - DNA, 18 bp, synthetic construct
  source 1..18: mol_type = other DNA
cacgacagcccacacaaa

SEQ ID NO: 4 - protein, 742 aa, synthetic construct
MAADGYLPDWLEDNLSEGIREWWALKPGAPQPKANQQHQDNARGLVLPGYKYLGPGNGLDKGEPVNAADAAALEHDKAYDQQLKAGDNPYLKYNHADAEFQERLKEDTSFGGNLGRAVFQAKKRLLEPLGLVEEAAKTAPGKKRPVEQSPQEPDSSAGIGKSGAQPAKKRLNFGQTGDTESVPDPQPIGEPPAAPSGVGSLTMASGGGAPVADNNEGADGVGSSSGNWHCDSQWLGDRVITTSTRTWALPTYNNHLYKQISNSTSGGSSNDNAYFGYSTPWGYFDFNRFHCHFSPRDWQRLINNNWGFRPKRLNFKLFNIQVKEVTDNNGVKTIANNLTSTVQVFTDSDYQLPYVLGSAHEGCLPPFPADVFMIPQYGYLTLNDGSQAVGRSSFYCLEYFPSQMLRTGNNFQFSYEFENVPFHSSYAHSQSLDRLMNPLIDQYLYYLSKTSNASGSPHSKAHNQQTLKFSVAGPSNMAVQGRNYIPGPSYRQQRVSTTVTQNNNSEFAWPGASSWALNGRNSLMNPGPAMASHKEGEDRFFPLSGSLIFGKQGTGRDNVDADKVMITNEEEIKTTNPVATESYGQVATNHQSAQAQAQTGWVQNQGILPGMVWQDRDVYLQGPIWAKIPHTDGNFHPSPLMGGFGMKHPPPQILIKNTPVPADPPTAFNKDKLNSFITQYSTGQVSVEIEWELQKENSKRWNPEIQYTSNYYKSNNVEFAVNTEGVYSEPRPIGTRYLTRNL

SEQ ID NO: 5 - protein, 742 aa, synthetic construct
MAADGYLPDWLEDNLSEGIREWWALKPGAPQPKANQQHQDNARGLVLPGYKYLGPGNGLDKGEPVNAADAAALEHDKAYDQQLKAGDNPYLKYNHADAEFQERLKEDTSFGGNLGRAVFQAKKRLLEPLGLVEEAAKTAPGKKRPVEQSPQEPDSSAGIGKSGAQPAKKRLNFGQTGDTESVPDPQPIGEPPAAPSGVGSLTMASGGGAPVADNNEGADGVGSSSGNWHCDSQWLGDRVITTSTRTWALPTYNNHLYKQISNSTSGGSSNDNAYFGYSTPWGYFDFNRFHCHFSPRDWQRLINNNWGFRPKRLNFKLFNIQVKEVTDNNGVKTIANNLTSTVQVFTDSDYQLPYVLGSAHEGCLPPFPADVFMIPQYGYLTLNDGSQAVGRSSFYCLEYFPSQMLRTGNNFQFSYEFENVPFHSSYAHSQSLDRLMNPLIDQYLYYLSKNSIGSGSPHSKAQNQQTLKFSVAGPSNMAVQGRNYIPGPSYRQQRVSTTVTQNNNSEFAWPGASSWALNGRNSLMNPGPAMASHKEGEDRFFPLSGSLIFGKQGTGRDNVDADKVMITNEEEIKTTNPVATESYGQVATNHQSAQAQAQTGWVQNQGILPGMVWQDRDVYLQGPIWAKIPHTDGNFHPSPLMGGFGMKHPPPQILIKNTPVPADPPTAFNKDKLNSFITQYSTGQVSVEIEWELQKENSKRWNPEIQYTSNYYKSNNVEFAVNTEGVYSEPRPIGTRYLTRNL

SEQ ID NO: 6 - protein, 742 aa, synthetic construct
MAADGYLPDWLEDNLSEGIREWWALKPGAPQPKANQQHQDNARGLVLPGYKYLGPGNGLDKGEPVNAADAAALEHDKAYDQQLKAGDNPYLKYNHADAEFQERLKEDTSFGGNLGRAVFQAKKRLLEPLGLVEEAAKTAPGKKRPVEQSPQEPDSSAGIGKSGAQPAKKRLNFGQTGDTESVPDPQPIGEPPAAPSGVGSLTMASGGGAPVADNNEGADGVGSSSGNWHCDSQWLGDRVITTSTRTWALPTYNNHLYKQISNSTSGGSSNDNAYFGYSTPWGYFDFNRFHCHFSPRDWQRLINNNWGFRPKRLNFKLFNIQVKEVTDNNGVKTIANNLTSTVQVFTDSDYQLPYVLGSAHEGCLPPFPADVFMIPQYGYLTLNDGSQAVGRSSFYCLEYFPSQMLRTGNNFQFSYEFENVPFHSSYAHSQSLDRLMNPLIDQYLYYLSKTVNGHDSPHKSGQRPSTLKFSVAGPSNMAVQGRNYIPGPSYRQQRVSTTVTQNNNSEFAWPGASSWALNGRNSLMNPGPAMASHKEGEDRFFPLSGSLIFGKQGTGRDNVDADKVMITNEEEIKTTNPVATESYGQVATNHQSAQAQAQTGWVQNQGILPGMVWQDRDVYLQGPIWAKIPHTDGNFHPSPLMGGFGMKHPPPQILIKNTPVPADPPTAFNKDKLNSFITQYSTGQVSVEIEWELQKENSKRWNPEIQYTSNYYKSNNVEFAVNTEGVYSEPRPIGTRYLTRNL

SEQ ID NO: 7 - protein, 742 aa, synthetic construct
MAADGYLPDWLEDNLSEGIREWWALKPGAPQPKANQQHQDNARGLVLPGYKYLGPGNGLDKGEPVNAADAAALEHDKAYDQQLKAGDNPYLKYNHADAEFQERLKEDTSFGGNLGRAVFQAKKRLLEPLGLVEEAAKTAPGKKRPVEQSPQEPDSSAGIGKSGAQPAKKRLNFGQTGDTESVPDPQPIGEPPAAPSGVGSLTMASGGGAPVADNNEGADGVGSSSGNWHCDSQWLGDRVITTSTRTWALPTYNNHLYKQISNSTSGGSSNDNAYFGYSTPWGYFDFNRFHCHFSPRDWQRLINNNWGFRPKRLNFKLFNIQVKEVTDNNGVKTIANNLTSTVQVFTDSDYQLPYVLGSAHEGCLPPFPADVFMIPQYGYLTLNDGSQAVGRSSFYCLEYFPSQMLRTGNNFQFSYEFENVPFHSSYAHSQSLDRLMNPLIDQYLYYLSKAENGSGSPHSKAQNQQTLKFSVAGPSNMAVQGRNYIPGPSYRQQRVSTTVTQNNNSEFAWPGASSWALNGRNSLMNPGPAMASHKEGEDRFFPLSGSLIFGKQGTGRDNVDADKVMITNEEEIKTTNPVATESYGQVATNHQSAQAQAQTGWVQNQGILPGMVWQDRDVYLQGPIWAKIPHTDGNFHPSPLMGGFGMKHPPPQILIKNTPVPADPPTAFNKDKLNSFITQYSTGQVSVEIEWELQKENSKRWNPEIQYTSNYYKSNNVEFAVNTEGVYSEPRPIGTRYLTRNL

SEQ ID NO: 8 - protein, 742 aa, synthetic construct
MAADGYLPDWLEDNLSEGIREWWALKPGAPQPKANQQHQDNARGLVLPGYKYLGPGNGLDKGEPVNAADAAALEHDKAYDQQLKAGDNPYLKYNHADAEFQERLKEDTSFGGNLGRAVFQAKKRLLEPLGLVEEAAKTAPGKKRPVEQSPQEPDSSAGIGKSGAQPAKKRLNFGQTGDTESVPDPQPIGEPPAAPSGVGSLTMASGGGAPVADNNEGADGVGSSSGNWHCDSQWLGDRVITTSTRTWALPTYNNHLYKQISNSTSGGSSNDNAYFGYSTPWGYFDFNRFHCHFSPRDWQRLINNNWGFRPKRLNFKLFNIQVKEVTDNNGVKTIANNLTSTVQVFTDSDYQLPYVLGSAHEGCLPPFPADVFMIPQYGYLTLNDGSQAVGRSSFYCLEYFPSQMLRTGNNFQFSYEFENVPFHSSYAHSQSLDRLMNPLIDQYLYYLSKTINGSGSPHKSGQNQQPLKFSVAGPSNMAVQGRNYIPGPSYRQQRVSTTVTQNNNSEFAWPGASSWALNGRNSLMNPGPAMASHKEGEDRFFPLSGSLIFGKQGTGRDNVDADKVMITNEEEIKTTNPVATESYGQVATNHQSAQAQAQTGWVQNQGILPGMVWQDRDVYLQGPIWAKIPHTDGNFHPSPLMGGFGMKHPPPQILIKNTPVPADPPTAFNKDKLNSFITQYSTGQVSVEIEWELQKENSKRWNPEIQYTSNYYKSNNVEFAVNTEGVYSEPRPIGTRYLTRNL

SEQ ID NO: 9 - DNA, 2226 bp, synthetic construct
  source 1..2226: mol_type = other DNA
atggctgccgatggttatcttccagattggctcgaggacaaccttagtgaaggaattcgcgagtggtgggctttgaaacctggagcccctcaacccaaggcaaatcaacaacatcaagacaacgctcgaggtcttgtgcttccgggttacaaataccttggacccggcaacggactcgacaagggggagccggtcaacgcagcagacgcggcggccctcgagcacgacaaggcctacgaccagcagctcaaggccggagacaacccgtacctcaagtacaaccacgccgacgccgagttccaggagcggctcaaagaagatacgtcttttgggggcaacctcgggcgagcagtcttccaggccaaaaagaggcttcttgaacctcttggtctggttgaggaagcggctaagacggctcctggaaagaagaggcctgtagagcagtctcctcaggaaccggactcctccgcgggtattggcaaatcgggtgcacagcccgctaaaaagagactcaatttcggtcagactggcgacacagagtcagtcccagaccctcaaccaatcggagaacctcccgcagccccctcaggtgtgggatctcttacaatggcttcaggtggtggcgcaccagtggcagacaataacgaaggtgccgatggagtgggtagttcctcgggaaattggcattgcgattcccaatggctgggggacagagtcatcaccaccagcacccgaacctgggccctgcccacctacaacaatcacctctacaagcaaatctccaacagcacatctggaggatcttcaaatgacaacgcctacttcggctacagcaccccctgggggtattttgacttcaacagattccactgccacttctcaccacgtgactggcagcgactcatcaacaacaactggggattccggcctaagcgactcaacttcaagctcttcaacattcaggtcaaagaggttacggacaacaatggagtcaagaccatcgccaataaccttaccagcacggtccaggtcttcacggactcagactatcagctcccgtacgtgctcgggtcggctcacgagggctgcctcccgccgttcccagcggacgttttcatgattcctcagtacgggtatctgacgcttaatgatggaagccaggccgtgggtcgttcgtccttttactgcctggaatatttcccgtcgcaaatgctaagaacgggtaacaacttccagttcagctacgagtttgagaacgtacctttccatagcagctacgctcacagccaaagcctggaccgactaatgaatccactcatcgaccaatacttgtactatctctctaagactgagaatgtgagcgggagccctcatagcaaggctcagaatcagcagactctaaaattcagtgtggccggacccagcaacatggctgtccagggaagaaactacatacctggacccagctaccgacaacaacgtgtctcaaccactgtgactcaaaacaacaacagcgaatttgcttggcctggagcttcttcttgggctctcaatggacgtaatagcttgatgaatcctggacctgctatggccagccacaaagaaggagaggaccgtttctttcctttgtctggatctttaatttttggcaaacaaggaactggaagagacaacgtggatgcggacaaagtcatgataaccaacgaagaagaaattaaaactactaacccggtagcaacggagtcctatggacaagtggccacaaaccaccagagtgcccaagcacaggcgcagaccggctgggttcaaaaccaaggaatacttccgggtatggtttggcaggacagagatgtgtacctgcaaggacccatttgggccaaaattcctcacacggacggcaactttcacccttctccgctgatgggagggtttggaatgaagcacccgcctcctcagatcctcatcaaaaacacacctgtacctgcggatcctccaacggccttcaacaaggacaagctgaactctttcatcacccagtattctactggccaagtcagcgtggagatcgagtgggagctgcagaaggaaaacagcaagcgctggaacccggagatccagtacacttccaactattacaagtctaataatgttgaatttgctgttaatactgaaggtgtatatagtgaaccccgccccattggcaccagatacctgactcgtaatctg

SEQ ID NO: 10 - protein, 743 aa, Adeno-associated virus
MAADGYLPDWLEDNLSEGIREWWALKPGAPQPKANQQHQDNARGLVLPGYKYLGPGNGLDKGEPVNAADAAALEHDKAYDQQLKAGDNPYLKYNHADAEFQERLKEDTSFGGNLGRAVFQAKKRLLEPLGLVEEAAKTAPGKKRPVEQSPQEPDSSAGIGKSGAQPAKKRLNFGQTGDTESVPDPQPIGEPPAAPSGVGSLTMASGGGAPVADNNEGADGVGSSSGNWHCDSQWLGDRVITTSTRTWALPTYNNHLYKQISNSTSGGSSNDNAYFGYSTPWGYFDFNRFHCHFSPRDWQRLINNNWGFRPKRLNFKLFNIQVKEVTDNNGVKTIANNLTSTVQVFTDSDYQLPYVLGSAHEGCLPPFPADVFMIPQYGYLTLNDGSQAVGRSSFYCLEYFPSQMLRTGNNFQFSYEFENVPFHSSYAHSQSLDRLMNPLIDQYLYYLSRTINGSGQNQQTLKFSVAGPSNMAVQGRNYIPGPSYRQQRVSTTVTQNNNSEFAWPGASSWALNGRNSLMNPGPAMASHKEGEDRFFPLSGSLIFGKQGTGRDNVDADKVMITNEEEIKTTNPVATESYGQVATNHQSDGTLAVPFKAQAQTGWVQNQGILPGMVWQDRDVYLQGPIWAKIPHTDGNFHPSPLMGGFGMKHPPPQILIKNTPVPADPPTAFNKDKLNSFITQYSTGQVSVEIEWELQKENSKRWNPEIQYTSNYYKSNNVEFAVNTEGVYSEPRPIGTRYLTRNL

SEQ ID NO: 11 - protein, 736 aa, Adeno-associated virus
MAADGYLPDWLEDNLSEGIREWWALKPGAPQPKANQQHQDNARGLVLPGYKYLGPGNGLDKGEPVNAADAAALEHDKAYDQQLKAGDNPYLKYNHADAEFQERLKEDTSFGGNLGRAVFQAKKRLLEPLGLVEEAAKTAPGKKRPVEQSPQEPDSSAGIGKSGAQPAKKRLNFGQTGDTESVPDPQPIGEPPAAPSGVGSLTMASGGGAPVADNNEGADGVGSSSGNWHCDSQWLGDRVITTSTRTWALPTYNNHLYKQISNSTSGGSSNDNAYFGYSTPWGYFDFNRFHCHFSPRDWQRLINNNWGFRPKRLNFKLFNIQVKEVTDNNGVKTIANNLTSTVQVFTDSDYQLPYVLGSAHEGCLPPFPADVFMIPQYGYLTLNDGSQAVGRSSFYCLEYFPSQMLRTGNNFQFSYEFENVPFHSSYAHSQSLDRLMNPLIDQYLYYLSRTINGSGQNQQTLKFSVAGPSNMAVQGRNYIPGPSYRQQRVSTTVTQNNNSEFAWPGASSWALNGRNSLMNPGPAMASHKEGEDRFFPLSGSLIFGKQGTGRDNVDADKVMITNEEEIKTTNPVATESYGQVATNHQSAQAQAQTGWVQNQGILPGMVWQDRDVYLQGPIWAKIPHTDGNFHPSPLMGGFGMKHPPPQILIKNTPVPADPPTAFNKDKLNSFITQYSTGQVSVEIEWELQKENSKRWNPEIQYTSNYYKSNNVEFAVNTEGVYSEPRPIGTRYLTRNL

SEQ ID NO: 12 - protein, 743 aa, Adeno-associated virus
MAADGYLPDWLEDNLSEGIREWWALKPGAPQPKANQQHQDNARGLVLPGYKYLGPGNGLDKGEPVNAADAAALEHDKAYDQQLKAGDNPYLKYNHADAEFQERLKEDTSFGGNLGRAVFQAKKRLLEPLGLVEEAAKTAPGKKRPVEQSPQEPDSSAGIGKSGAQPAKKRLNFGQTGDTESVPDPQPIGEPPAAPSGVGSLTMASGGGAPVADNNEGADGVGSSSGNWHCDSQWLGDRVITTSTRTWALPTYNNHLYKQISNSTSGGSSNDNAYFGYSTPWGYFDFNRFHCHFSPRDWQRLINNNWGFRPKRLNFKLFNIQVKEVTDNNGVKTIANNLTSTVQVFTDSDYQLPYVLGSAHEGCLPPFPADVFMIPQYGYLTLNDGSQAVGRSSFYCLEYFPSQMLRTGNNFQFSYEFENVPFHSSYAHSQSLDRLMNPLIDQYLYYLSRTINGSGQNQQTLKFSVAGPSNMAVQGRNYIPGPSYRQQRVSTTVTQNNNSEFAWPGASSWALNGRNSLMNPGPAMASHKEGEDRFFPLSGSLIFGKQGTGRDNVDADKVMITNEEEIKTTNPVATESYGQVATNHQSAQTLAVPFKAQAQTGWVQNQGILPGMVWQDRDVYLQGPIWAKIPHTDGNFHPSPLMGGFGMKHPPPQILIKNTPVPADPPTAFNKDKLNSFITQYSTGQVSVEIEWELQKENSKRWNPEIQYTSNYYKSNNVEFAVNTEGVYSEPRPIGTRYLTRNL

SEQ ID NO: 13 - protein, 743 aa, Adeno-associated virus
MAADGYLPDWLEDNLSEGIREWWALKPGAPQPKANQQHQDNARGLVLPGYKYLGPGNGLDKGEPVNAADAAALEHDKAYDQQLKAGDNPYLKYNHADAEFQERLKEDTSFGGNLGRAVFQAKKRLLEPLGLVEEAAKTAPGKKRPVEQSPQEPDSSAGIGKSGAQPAKKRLNFGQTGDTESVPDPQPIGEPPAAPSGVGSLTMASGGGAPVADNNEGADGVGSSSGNWHCDSQWLGDRVITTSTRTWALPTYNNHLYKQISNSTSGGSSNDNAYFGYSTPWGYFDFNRFHCHFSPRDWQRLINNNWGFRPKRLNFKLFNIQVKEVTDNNGVKTIANNLTSTVQVFTDSDYQLPYVLGSAHEGCLPPFPADVFMIPQYGYLTLNDGSQAVGRSSFYCLEYFPSQMLRTGNNFQFSYEFENVPFHSSYAHSQSLDRLMNPLIDQYLYYLSRTINGSGQNQQTLKFSVAGPSNMAVQGRNYIPGPSYRQQRVSTTVTQNNNSEFAWPGASSWALNGRNSLMNPGPAMASHKEGEDRFFPLSGSLIFGKQGTGRDNVDADKVMITNEEEIKTTNPVATESYGQVATNHQSAQTLAVPFSNPAQTGWVQNQGILPGMVWQDRDVYLQGPIWAKIPHTDGNFHPSPLMGGFGMKHPPPQILIKNTPVPADPPTAFNKDKLNSFITQYSTGQVSVEIEWELQKENSKRWNPEIQYTSNYYKSNNVEFAVNTEGVYSEPRPIGTRYLTRNL

SEQ ID NO: 14 - protein, 738 aa, Adeno-associated virus
MAADGYLPDWLEDNLSEGIREWWDLKPGAPKPKANQQKQDDGRGLVLPGYKYLGPFNGLDKGEPVNAADAAALEHDKAYDQQLKAGDNPYLRYNHADAEFQERLQEDTSFGGNLGRAVFQAKKRVLEPLGLVEEGAKTAPGKKRPVEPSPQRSPDSSTGIGKKGQQPAKKRLNFGQTGDSESVPDPQPIGEPPAGPSGLGSGTMAAGGGAPMADNNEGADGVGSSSGNWHCDSTWLGDRVITTSTRTWALPTYNNHLYKQISNGTSGGSTNDNTYFGYSTPWGYFDFNRFHCHFSPRDWQRLINNNWGFRPKRLNFKLFNIQVKEVTQNEGTKTIANNLTSTIQVFTDSEYQLPYVLGSAHQGCLPPFPADVFMIPQYGYLTLNNGSQAVGRSSFYCLEYFPSQMLRTGNNFEFSYQFEDVPFHSSYAHSQSLDRLMNPLIDQYLYYLSRTQSTGGTAGTQQLLFSQAGPNNMSAQAKNWLPGPCYRQQRVSTTLSQNNNSNFAWTGATKYHLNGRDSLVNPGVAMATHKDDEERFFPSSGVLMFGKQGAGKDNVDYSSVMLTSEEEIKTTNPVATEQYGVVADNLQQQNAAPIVGAVNSQGALPGMVWQNRDVYLQGPIWAKIPHTDGNFHPSPLMGGFGLKHPPPQILIKNTPVPADPPTTFSQAKLASFITQYSTGQVSVEIEWELQKENSKRWNPEIQYTSNYYKSTNVDFAVNTDGTYSEPRPIGTRYLTRNL

SEQ ID NO: 15 - DNA, 2217 bp, Adeno-associated virus
  source 1..2217: mol_type = genomic DNA
atggctgccgatggttatcttccagattggctcgaggacaacctctctgagggcattcgcgagtggtgggacttgaaacctggagccccgaaacccaaagccaaccagcaaaagcaggacgacggccggggtctggtgcttcctggctacaagtacctcggacccttcaacggactcgacaagggggagcccgtcaacgcggcggacgcagcggccctcgagcacgacaaggcctacgaccagcagctcaaagcgggtgacaatccgtacctgcggtataaccacgccgacgccgagtttcaggagcgtctgcaagaagatacgtcttttgggggcaacctcgggcgagcagtcttccaggccaagaagcgggttctcgaacctctcggtctggttgaggaaggcgctaagacggctcctggaaagaagagaccggtagagccatcaccccagcgttctccagactcctctacgggcatcggcaagaaaggccagcagcccgcgaaaaagagactcaactttgggcagactggcgactcagagtcagtgcccgaccctcaaccaatcggagaaccccccgcaggcccctctggtctgggatctggtacaatggctgcaggcggtggcgctccaatggcagacaataacgaaggcgccgacggagtgggtagttcctcaggaaattggcattgcgattccacatggctgggcgacagagtcatcaccaccagcacccgaacctgggccctccccacctacaacaaccacctctacaagcaaatctccaacgggacttcgggaggaagcaccaacgacaacacctacttcggctacagcaccccctgggggtattttgactttaacagattccactgccacttctcaccacgtgactggcagcgactcatcaacaacaactggggattccggcccaagagactcaacttcaagctcttcaacatccaggtcaaggaggtcacgcagaatgaaggcaccaagaccatcgccaataaccttaccagcacgattcaggtctttacggactcggaataccagctcccgtacgtcctcggctctgcgcaccagggctgcctgcctccgttcccggcggacgtcttcatgattcctcagtacgggtacctgactctgaacaatggcagtcaggccgtgggccgttcctccttctactgcctggagtactttccttctcaaatgctgagaacgggcaacaactttgagttcagctaccagtttgaggacgtgccttttcacagcagctacgcgcacagccaaagcctggaccggctgatgaaccccctcatcgaccagtacctgtactacctgtctcggactcagtccacgggaggtaccgcaggaactcagcagttgctattttctcaggccgggcctaataacatgtcggctcaggccaaaaactggctacccgggccctgctaccggcagcaacgcgtctccacgacactgtcgcaaaataacaacagcaactttgcctggaccggtgccaccaagtatcatctgaatggcagagactctctggtaaatcccggtgtcgctatggcaacccacaaggacgacgaagagcgattttttccgtccagcggagtcttaatgtttgggaaacagggagctggaaaagacaacgtggactatagcagcgttatgctaaccagtgaggaagaaattaaaaccaccaacccagtggccacagaacagtacggcgtggtggccgataacctgcaacagcaaaacgccgctcctattgtaggggccgtcaacagtcaaggagccttacctggcatggtctggcagaaccgggacgtgtacctgcagggtcctatctgggccaagattcctcacacggacggaaactttcatccctcgccgctgatgggaggctttggactgaaacacccgcctcctcagatcctgattaagaatacacctgttcccgcggatcctccaactaccttcagtcaagctaagctggcgtcgttcatcacgcagtacagcaccggacaggtcagcgtggaaattgaatgggagctgcagaaagaaaacagcaaacgctggaacccagagattcaatacacttccaactactacaaatctacaaatgtggactttgctgttaacacagatggcacttattctgagcctcgccccatcggcacccgttacctcacccgtaatctgtaa

SEQ ID NO: 16 - protein, 735 aa, Adeno-associated virus 2 [sequence omitted]

SEQ ID NO: 17 - DNA, 2208 bp, Adeno-associated virus 2
  source 1..2208: mol_type = genomic DNA
atggctgccgatggttatcttccagattggctcgaggacactctctctgaaggaataagacagtggtggaagctcaaacctggcccaccaccaccaaagcccgcagagcggcataaggacgacagcaggggtcttgtgcttcctgggtacaagtacctcggacccttcaacggactcgacaagggagagccggtcaacgaggcagacgccgcggccctcgagcacgacaaagcctacgaccggcagctcgacagcggagacaacccgtacctcaagtacaaccacgccgacgcggagtttcaggagcgccttaaagaagatacgtcttttgggggcaacctcggacgagcagtcttccaggcgaaaaagagggttcttgaacctctgggcctggttgaggaacctgttaagacggctccgggaaaaaagaggccggtagagcactctcctgtggagccagactcctcctcgggaaccggaaaggcgggccagcagcctgcaagaaaaagattgaattttggtcagactggagacgcagactcagtacctgacccccagcctctcggacagccaccagcagccccctctggtctgggaactaatacgatggctacaggcagtggcgcaccaatggcagacaataacgagggcgccgacggagtgggtaattcctcgggaaattggcattgcgattccacatggatgggcgacagagtcatcaccaccagcacccgaacctgggccctgcccacctacaacaaccacctctacaaacaaatttccagccaatcaggagcctcgaacgacaatcactactttggctacagcaccccttgggggtattttgacttcaacagattccactgccacttttcaccacgtgactggcaaagactcatcaacaacaactggggattccgacccaagagactcaacttcaagctctttaacattcaagtcaaagaggtcacgcagaatgacggtacgacgacgattgccaataaccttaccagcacggttcaggtgtttactgactcggagtaccagctcccgtacgtcctcggctcggcgcatcaaggatgcctcccgccgttcccagcagacgtcttcatggtgccacagtatggatacctcaccctgaacaacgggagtcaggcagtaggacgctcttcattttactgcctggagtactttccttctcagatgctgcgtaccggaaacaactttaccttcagctacacttttgaggacgttcctttccacagcagctacgctcacagccagagtctggaccgtctcatgaatcctctcatcgaccagtacctgtattacttgagcagaacaaacactccaagtggaaccaccacgcagtcaaggcttcagttttctcaggccggagcgagtgacattcgggaccagtctaggaactggcttcctggaccctgttaccgccagcagcgagtatcaaagacatctgcggataacaacaacagtgaatactcgtggactggagctaccaagtaccacctcaatggcagagactctctggtgaatccgggcccggccatggcaagccacaaggacgatgaagaaaagttttttcctcagagcggggttctcatctttgggaagcaaggctcagagaaaacaaatgtggacattgaaaaggtcatgattacagacgaagaggaaatcaggacaaccaatcccgtggctacggagcagtatggttctgtatctaccaacctccagagaggcaacagacaagcagctaccgcagatgtcaacacacaaggcgttcttccaggcatggtctggcaggacagagatgtgtaccttcaggggcccatctgggcaaagattccacacacggacggacattttcacccctctcccctcatgggtggattcggacttaaacaccctcctccacagattctcatcaagaacaccccggtacctgcgaatccttcgaccaccttcagtgcggcaaagtttgcttccttcatcacacagtactccacgggacaggtcagcgtggagatcgagtgggagctgcagaaggaaaacagcaaacgctggaatcccgaaattcagtacacttccaactacaacaagtctgttaatgtggactttactgtggacactaatggcgtgtattcagagcctcgccccattggcaccagatacctgactcgtaatctgtaa

SEQ ID NO: 18 - protein, 736 aa, Adeno-associated virus 1
MAADGYLPDWLEDNLSEGIREWWDLKPGAPKPKANQQKQDDGRGLVLPGYKYLGPFNGLDKGEPVNAADAAALEHDKAYDQQLKAGDNPYLRYNHADAEFQERLQEDTSFGGNLGRAVFQAKKRVLEPLGLVEEGAKTAPGKKRPVEQSPQEPDSSSGIGKTGQQPAKKRLNFGQTGDSESVPDPQPLGEPPATPAAVGPTTMASGGGAPMADNNEGADGVGNASGNWHCDSTWLGDRVITTSTRTWALPTYNNHLYKQISSASTGASNDNHYFGYSTPWGYFDFNRFHCHFSPRDWQRLINNNWGFRPKRLNFKLFNIQVKEVTTNDGVTTIANNLTSTVQVFSDSEYQLPYVLGSAHQGCLPPFPADVFMIPQYGYLTLNNGSQAVGRSSFYCLEYFPSQMLRTGNNFTFSYTFEEVPFHSSYAHSQSLDRLMNPLIDQYLYYLNRTQNQSGSAQNKDLLFSRGSPAGMSVQPKNWLPGPCYRQQRVSKTKTDNNNSNFTWTGASKYNLNGRESIINPGTAMASHKDDEDKFFPMSGVMIFGKESAGASNTALDNVMITDEEEIKATNPVATERFGTVAVNFQSSSTDPATGDVHAMGALPGMVWQDRDVYLQGPIWAKIPHTDGHFHPSPLMGGFGLKNPPPQILIKNTPVPANPPAEFSATKFASFITQYSTGQVSVEIEWELQKENSKRWNPEVQYTSNYAKSANVDFTVDNNGLYTEPRPIGTRYLTRPL

SEQ ID NO: 19 - DNA, 2211 bp, Adeno-associated virus 1
  source 1..2211: mol_type = genomic DNA
atggctgccgatggttatcttccagattggctcgaggacaacctctctgagggcattcgcgagtggtgggacttgaaacctggagccccgaagcccaaagccaaccagcaaaagcaggacgacggccggggtctggtgcttcctggctacaagtacctcggacccttcaacggactcgacaagggggagcccgtcaacgcggcggacgcagcggccctcgagcacgacaaggcctacgaccagcagctcaaagcgggtgacaatccgtacctgcggtataaccacgccgacgccgagtttcaggagcgtctgcaagaagatacgtcttttgggggcaacctcgggcgagcagtcttccaggccaagaagcgggttctcgaacctctcggtctggttgaggaaggcgctaagacggctcctggaaagaaacgtccggtagagcagtcgccacaagagccagactcctcctcgggcatcggcaagacaggccagcagcccgctaaaaagagactcaattttggtcagactggcgactcagagtcagtccccgatccacaacctctcggagaacctccagcaacccccgctgctgtgggacctactacaatggcttcaggcggtggcgcaccaatggcagacaataacgaaggcgccgacggagtgggtaatgcctcaggaaattggcattgcgattccacatggctgggcgacagagtcatcaccaccagcacccgcacctgggccttgcccacctacaataaccacctctacaagcaaatctccagtgcttcaacgggggccagcaacgacaaccactacttcggctacagcaccccctgggggtattttgatttcaacagattccactgccacttttcaccacgtgactggcagcgactcatcaacaacaattggggattccggcccaagagactcaacttcaaactcttcaacatccaagtcaaggaggtcacgacgaatgatggcgtcacaaccatcgctaataaccttaccagcacggttcaagtcttctcggactcggagtaccagcttccgtacgtcctcggctctgcgcaccagggctgcctccctccgttcccggcggacgtgttcatgattccgcaatacggctacctgacgctcaacaatggcagccaagccgtgggacgttcatccttttactgcctggaatatttcccttctcagatgctgagaacgggcaacaactttaccttcagctacacctttgaggaagtgcctttccacagcagctacgcgcacagccagagcctggaccggctgatgaatcctctcatcgaccaatacctgtattacctgaacagaactcaaaatcagtccggaagtgcccaaaacaaggacttgctgtttagccgtgggtctccagctggcatgtctgttcagcccaaaaactggctacctggaccctgttatcggcagcagcgcgtttctaaaacaaaaacagacaacaacaacagcaattttacctggactggtgcttcaaaatataacctcaatgggcgtgaatccatcatcaaccctggcactgctatggcctcacacaaagacgacgaagacaagttctttcccatgagcggtgtcatgatttttggaaaagagagcgccggagcttcaaacactgcattggacaatgtcatgattacagacgaagaggaaattaaagccactaaccctgtggccaccgaaagatttgggaccgtggcagtcaatttccagagcagcagcacagaccctgcgaccggagatgtgcatgctatgggagcattacctggcatggtgtggcaagatagagacgtgtacctgcagggtcccatttgggccaaaattcctcacacagatggacactttcacccgtctcctcttatgggcggctttggactcaagaacccgcctcctcagatcctcatcaaaaacacgcctgttcctgcgaatcctccggcggagttttcagctacaaagtttgcttcattcatcacccaatactccacaggacaagtgagtgtggaaattgaatgggagctgcagaaagaaaacagcaagcgctggaatcccgaagtgcagtacacatccaattatgcaaaatctgccaacgttgattttactgtggacaacaatggactttatactgagcctcgccccattggcacccgttaccttacccgtcccctgtaa

SEQ ID NO: 20 - protein, 724 aa, Adeno-associated virus 5
MSFVDHPPDWLEEVGEGLREFLGLEAGPPKPKPNQQHQDQARGLVLPGYNYLGPGNGLDRGEPVNRADEVAREHDISYNEQLEAGDNPYLKYNHADAEFQEKLADDTSFGGNLGKAVFQAKKRVLEPFGLVEEGAKTAPTGKRIDDHFPKRKKARTEEDSKPSTSSDAEAGPSGSQQLQIPAQPASSLGADTMSAGGGGPLGDNNQGADGVGNASGDWHCDSTWMGDRVVTKSTRTWVLPSYNNHQYREIKSGSVDGSNANAYFGYSTPWGYFDFNRFHSHWSPRDWQRLINNYWGFRPRSLRVKIFNIQVKEVTVQDSTTTIANNLTSTVQVFTDDDYQLPYVVGNGTEGCLPAFPPQVFTLPQYGYATLNRDNTENPTERSSFFCLEYFPSKMLRTGNNFEFTYNFEEVPFHSSFAPSQNLFKLANPLVDQYLYRFVSTNNTGGVQFNKNLAGRYANTYKNWFPGPMGRTQGWNLGSGVNRASVSAFATTNRMELEGASYQVPPQPNGMTNNLQGSNTYALENTMIFNSQPANPGTTATYLEGNMLITSESETQPVNRVAYNVGGQMATNNQSSTTAPATGTYNLQEIVPGSVWMERDVYLQGPIWAKIPETGAHFHPSPAMGGFGLKHPPPMMLIKNTPVPGNITSFSDVPVSSFITQYSTGQVTVEMEWELKKENSKRWNPEIQYTNNYNDPQFVDFAPDSTGEYRTTRPIGTRYLTRPL

SEQ ID NO: 21 - DNA, 2175 bp, Adeno-associated virus 5
  source 1..2175: mol_type = genomic DNA
atgtcttttgttgatcaccctccagattggttggaagaagttggtgaaggtcttcgcgagtttttgggccttgaagcgggcccaccgaaaccaaaacccaatcagcagcatcaagatcaagcccgtggtcttgtgctgcctggttataactatctcggacccggaaacggtctcgatcgaggagagcctgtcaacagggcagacgaggtcgcgcgagagcacgacatctcgtacaacgagcagcttgaggcgggagacaacccctacctcaagtacaaccacgcggacgccgagtttcaggagaagctcgccgacgacacatccttcgggggaaacctcggaaaggcagtctttcaggccaagaaaagggttctcgaaccttttggcctggttgaagagggtgctaagacggcccctaccggaaagcggatagacgaccactttccaaaaagaaagaaggcccggaccgaagaggactccaagccttccacctcgtcagacgccgaagctggacccagcggatcccagcagctgcaaatcccagcccaaccagcctcaagtttgggagctgatacaatgtctgcgggaggtggcggcccattgggcgacaataaccaaggtgccgatggagtgggcaatgcctcgggagattggcattgcgattccacgtggatgggggacagagtcgtcaccaagtccacccgaacctgggtgctgcccagctacaacaaccaccagtaccgagagatcaaaagcggctccgtcgacggaagcaacgccaacgcctactttggatacagcaccccctgggggtactttgactttaaccgcttccacagccactggagcccccgagactggcaaagactcatcaacaactactggggcttcagaccccggtccctcagagtcaaaatcttcaacattcaagtcaaagaggtcacggtgcaggactccaccaccaccatcgccaacaacctcacctccaccgtccaagtgtttacggacgacgactaccagctgccctacgtcgtcggcaacgggaccgagggatgcctgccggccttccctccgcaggtctttacgctgccgcagtacggttacgcgacgctgaaccgcgacaacacagaaaatcccaccgagaggagcagcttcttctgcctagagtactttcccagcaagatgctgagaacgggcaacaactttgagtttacctacaactttgaggaggtgcccttccactccagcttcgctcccagtcagaacctcttcaagctggccaacccgctggtggaccagtacttgtaccgcttcgtgagcacaaataacactggcggagtccagttcaacaagaacctggccgggagatacgccaacacctacaaaaactggttcccggggcccatgggccgaacccagggctggaacctgggctccggggtcaaccgcgccagtgtcagcgccttcgccacgaccaataggatggagctcgagggcgcgagttaccaggtgcccccgcagccgaacggcatgaccaacaacctccagggcagcaacacctatgccctggagaacactatgatcttcaacagccagccggcgaacccgggcaccaccgccacgtacctcgagggcaacatgctcatcaccagcgagagcgagacgcagccggtgaaccgcgtggcgtacaacgtcggcgggcagatggccaccaacaaccagagctccaccactgcccccgcgaccggcacgtacaacctccaggaaatcgtgcccggcagcgtgtggatggagagggacgtgtacctccaaggacccatctgggccaagatcccagagacgggggcgcactttcacccctctccggccatgggcggattcggactcaaacacccaccgcccatgatgctcatcaagaacacgcctgtgcccggaaatatcaccagcttctcggacgtgcccgtcagcagcttcatcacccagtacagcaccgggcaggtcaccgtggagatggagtgggagctcaagaaggaaaactccaagaggtggaacccagagatccagtacacaaacaactacaacgacccccagtttgtggactttgccccggacagcaccggggaatacagaaccaccagacctatcggaacccgataccttacccgacccctttaa

SEQ ID NO: 22 - DNA, 2226 bp, synthetic construct
  source 1..2226: mol_type = other DNA
atggctgccgatggttatcttccagattggctcgaggacaaccttagtgaaggaattcgcgagtggtgggctttgaaacctggagcccctcaacccaaggcaaatcaacaacatcaagacaacgctcgaggtcttgtgcttccgggttacaaataccttggacccggcaacggactcgacaagggggagccggtcaacgcagcagacgcggcggccctcgagcacgacaaggcctacgaccagcagctcaaggccggagacaacccgtacctcaagtacaaccacgccgacgccgagttccaggagcggctcaaagaagatacgtcttttgggggcaacctcgggcgagcagtcttccaggccaaaaagaggcttcttgaacctcttggtctggttgaggaagcggctaagacggctcctggaaagaagaggcctgtagagcagtctcctcaggaaccggactcctccgcgggtattggcaaatcgggtgcacagcccgctaaaaagagactcaatttcggtcagactggcgacacagagtcagtcccagaccctcaaccaatcggagaacctcccgcagccccctcaggtgtgggatctcttacaatggcttcaggtggtggcgcaccagtggcagacaataacgaaggtgccgatggagtgggtagttcctcgggaaattggcattgcgattcccaatggctgggggacagagtcatcaccaccagcacccgaacctgggccctgcccacctacaacaatcacctctacaagcaaatctccaacagcacatctggaggatcttcaaatgacaacgcctacttcggctacagcaccccctgggggtattttgacttcaacagattccactgccacttctcaccacgtgactggcagcgactcatcaacaacaactggggattccggcctaagcgactcaacttcaagctcttcaacattcaggtcaaagaggttacggacaacaatggagtcaagaccatcgccaataaccttaccagcacggtccaggtcttcacggactcagactatcagctcccgtacgtgctcgggtcggctcacgagggctgcctcccgccgttcccagcggacgttttcatgattcctcagtacgggtatctgacgcttaatgatggaagccaggccgtgggtcgttcgtccttttactgcctggaatatttcccgtcgcaaatgctaagaacgggtaacaacttccagttcagctacgagtttgagaacgtacctttccatagcagctacgctcacagccaaagcctggaccgactaatgaatccactcatcgatcagtatctgtattacttgagtaagacgcagcgtaagtctggttctccgcattctaaggcgcagaatcagcagacgttgaagttttcggtagctggtcctagcaacatggctgtccagggaagaaactacatacctggacccagctaccgacaacaacgtgtctcaaccactgtgactcaaaacaacaacagcgaatttgcttggcctggagcttcttcttgggctctcaatggacgtaatagcttgatgaatcctggacctgctatggccagccacaaagaaggagaggaccgtttctttcctttgtctggatctttaatttttggcaaacaaggaactggaagagacaacgtggatgcggacaaagtcatgataaccaacgaagaagaaattaaaactactaacccggtagcaacggagtcctatggacaagtggccacaaaccaccagagtgcccaagcacaggcgcagaccggctgggttcaaaaccaaggaatacttccgggtatggtttggcaggacagagatgtgtacctgcaaggacccatttgggccaaaattcctcacacggacggcaactttcacccttctccgctgatgggagggtttggaatgaagcacccgcctcctcagatcctcatcaaaaacacacctgtacctgcggatcctccaacggccttcaacaaggacaagctgaactctttcatcacccagtattctactggccaagtcagcgtggagatcgagtgggagctgcagaaggaaaacagcaagcgctggaacccggagatccagtacacttccaactattacaagtctaataatgttgaatttgctgttaatactgaaggtgtatatagtgaaccccgccccattggcacgcggtatttaacgaggaactta

SEQ ID NO: 23 - DNA, 2226 bp, synthetic construct
  source 1..2226: mol_type = other DNA
atggctgccgatggttatcttccagattggctcgaggacaaccttagtgaaggaattcgcgagtggtgggctttgaaacctggagcccctcaacccaaggcaaatcaacaacatcaagacaacgctcgaggtcttgtgcttccgggttacaaataccttggacccggcaacggactcgacaagggggagccggtcaacgcagcagacgcggcggccctcgagcacgacaaggcctacgaccagcagctcaaggccggagacaacccgtacctcaagtacaaccacgccgacgccgagttccaggagcggctcaaagaagatacgtcttttgggggcaacctcgggcgagcagtcttccaggccaaaaagaggcttcttgaacctcttggtctggttgaggaagcggctaagacggctcctggaaagaagaggcctgtagagcagtctcctcaggaaccggactcctccgcgggtattggcaaatcgggtgcacagcccgctaaaaagagactcaatttcggtcagactggcgacacagagtcagtcccagaccctcaaccaatcggagaacctcccgcagccccctcaggtgtgggatctcttacaatggcttcaggtggtggcgcaccagtggcagacaataacgaaggtgccgatggagtgggtagttcctcgggaaattggcattgcgattcccaatggctgggggacagagtcatcaccaccagcacccgaacctgggccctgcccacctacaacaatcacctctacaagcaaatctccaacagcacatctggaggatcttcaaatgacaacgcctacttcggctacagcaccccctgggggtattttgacttcaacagattccactgccacttctcaccacgtgactggcagcgactcatcaacaacaactggggattccggcctaagcgactcaacttcaagctcttcaacattcaggtcaaagaggttacggacaacaatggagtcaagaccatcgccaataaccttaccagcacggtccaggtcttcacggactcagactatcagctcccgtacgtgctcgggtcggctcacgagggctgcctcccgccgttcccagcggacgttttcatgattcctcagtacgggtatctgacgcttaatgatggaagccaggccgtgggtcgttcgtccttttactgcctggaatatttcccgtcgcaaatgctaagaacgggtaacaacttccagttcagctacgagtttgagaacgtacctttccatagcagctacgctcacagccaaagcctggaccgactaatgaatccactcatcgatcagtatctgtattacttgagtaagacgattaatggttctggttctccgcattctaaggcgcaggcgcgtaagacgttgaagttttcggtagctggtcctagcaacatggctgtccagggaagaaactacatacctggacccagctaccgacaacaacgtgtctcaaccactgtgactcaaaacaacaacagcgaatttgcttggcctggagcttcttcttgggctctcaatggacgtaatagcttgatgaatcctggacctgctatggccagccacaaagaaggagaggaccgtttctttcctttgtctggatctttaatttttggcaaacaaggaactggaagagacaacgtggatgcggacaaagtcatgataaccaacgaagaagaaattaaaactactaacccggtagcaacggagtcctatggacaagtggccacaaaccaccagagtgcccaagcacaggcgcagaccggctgggttcaaaaccaaggaatacttccgggtatggtttggcaggacagagatgtgtacctgcaaggacccatttgggccaaaattcctcacacggacggcaactttcacccttctccgctgatgggagggtttggaatgaagcacccgcctcctcagatcctcatcaaaaacacacctgtacctgcggatcctccaacggccttcaacaaggacaagctgaactctttcatcacccagtattctactggccaagtcagcgtggagatcgagtgggagctgcagaaggaaaacagcaagcgctggaacccggagatccagtacacttccaactattacaagtctaataatgttgaatttgctgttaatactgaaggtgtatatagtgaaccccgccccattggcacgcggtatttaacgaggaactta

SEQ ID NO: 24 - DNA, 2226 bp, synthetic construct
  source 1..2226: mol_type = other DNA
atggctgccgatggttatcttccagattggctcgaggacaaccttagtgaaggaattcgcgagtggtgggctttgaaacctggagcccctcaacccaaggcaaatcaacaacatcaagacaacgctcgaggtcttgtgcttccgggttacaaataccttggacccggcaacggactcgacaagggggagccggtcaacgcagcagacgcggcggccctcgagcacgacaaggcctacgaccagcagctcaaggccggagacaacccgtacctcaagtacaaccacgccgacgccgagttccaggagcggctcaaagaagatacgtcttttgggggcaacctcgggcgagcagtcttccaggccaaaaagaggcttcttgaacctcttggtctggttgaggaagcggctaagacggctcctggaaagaagaggcctgtagagcagtctcctcaggaaccggactcctccgcgggtattggcaaatcgggtgcacagcccgctaaaaagagactcaatttcggtcagactggcgacacagagtcagtcccagaccctcaaccaatcggagaacctcccgcagccccctcaggtgtgggatctcttacaatggcttcaggtggtggcgcaccagtggcagacaataacgaaggtgccgatggagtgggtagttcctcgggaaattggcattgcgattcccaatggctgggggacagagtcatcaccaccagcacccgaacctgggccctgcccacctacaacaatcacctctacaagcaaatctccaacagcacatctggaggatcttcaaatgacaacgcctacttcggctacagcaccccctgggggtattttgacttcaacagattccactgccacttctcaccacgtgactggcagcgactcatcaacaacaactggggattccggcctaagcgactcaacttcaagctcttcaacattcaggtcaaagaggttacggacaacaatggagtcaagaccatcgccaataaccttaccagcacggtccaggtcttcacggactcagactatcagctcccgtacgtgctcgggtcggctcacgagggctgcctcccgccgttcccagcggacgttttcatgattcctcagtacgggtatctgacgcttaatgatggaagccaggccgtgggtcgttcgtccttttactgcctggaatatttcccgtcgcaaatgctaagaacgggtaacaacttccagttcagctacgagtttgagaacgtacctttccatagcagctacgctcacagccaaagcctggaccgactaatgaatccactcatcgatcagtatctgtattacttgagtaagtatattgtgggttctggttctccgcattctaaggcgcagaatcagcagacgttgaagttttcggtagctggtcctagcaacatggctgtccagggaagaaactacatacctggacccagctaccgacaacaacgtgtctcaaccactgtgactcaaaacaacaacagcgaatttgcttggcctggagcttcttcttgggctctcaatggacgtaatagcttgatgaatcctggacctgctatggccagccacaaagaaggagaggaccgtttctttcctttgtctggatctttaatttttggcaaacaaggaactggaagagacaacgtggatgcggacaaagtcatgataaccaacgaagaagaaattaaaactactaacccggtagcaacggagtcctatggacaagtggccacaaaccaccagagtgcccaagcacaggcgcagaccggctgggttcaaaaccaaggaatacttccgggtatggtttggcaggacagagatgtgtacctgcaaggacccatttgggccaaaattcctcacacggacggcaactttcacccttctccgctgatgggagggtttggaatgaagcacccgcctcctcagatcctcatcaaaaacacacctgtacctgcggatcctccaacggccttcaacaaggacaagctgaactctttcatcacccagtattctactggccaagtcagcgtggagatcgagtgggagctgcagaaggaaaacagcaagcgctggaacccggagatccagtacacttccaactattacaagtctaataatgttgaatttgctgttaatactgaaggtgtatatagtgaaccccgccccattggcacgcggtatttaacgaggaactta

SEQ ID NO: 25 - DNA, 2226 bp, synthetic construct
  source 1..2226: mol_type = other DNA
atggctgccgatggttatcttccagattggctcgaggacaaccttagtgaaggaattcgcgagtggtgggctttgaaacctggagcccctcaacccaaggcaaatcaacaacatcaagacaacgctcgaggtcttgtgcttccgggttacaaataccttggacccggcaacggactcgacaagggggagccggtcaacgcagcagacgcggcggccctcgagcacgacaaggcctacgaccagcagctcaaggccggagacaacccgtacctcaagtacaaccacgccgacgccgagttccaggagcggctcaaagaagatacgtcttttgggggcaacctcgggcgagcagtcttccaggccaaaaagaggcttcttgaacctcttggtctggttgaggaagcggctaagacggctcctggaaagaagaggcctgtagagcagtctcctcaggaaccggactcctccgcgggtattggcaaatcgggtgcacagcccgctaaaaagagactcaatttcggtcagactggcgacacagagtcagtcccagaccctcaaccaatcggagaacctcccgcagccccctcaggtgtgggatctcttacaatggcttcaggtggtggcgcaccagtggcagacaataacgaaggtgccgatggagtgggtagttcctcgggaaattggcattgcgattcccaatggctgggggacagagtcatcaccaccagcacccgaacctgggccctgcccacctacaacaatcacctctacaagcaaatctccaacagcacatctggaggatcttcaaatgacaacgcctacttcggctacagcaccccctgggggtattttgacttcaacagattccactgccacttctcaccacgtgactggcagcgactcatcaacaacaactggggattccggcctaagcgactcaacttcaagctcttcaacattcaggtcaaagaggttacggacaacaatggagtcaagaccatcgccaataaccttaccagcacggtccaggtcttcacggactcagactatcagctcccgtacgtgctcgggtcggctcacgagggctgcctcccgccgttcccagcggacgttttcatgattcctcagtacgggtatctgacgcttaatgatggaagccaggccgtgggtcgttcgtccttttactgcctggaatatttcccgtcgcaaatgctaagaacgggtaacaacttccagttcagctacgagtttgagaacgtacctttccatagcagctacgctcacagccaaagcctggaccgactaatgaatccactcatcgatcagtatctgtattacttgagtaagacgatttctaagcgtggttctccgcattctaaggcgcagaatcagcagacgttgaagttttcggtagctggtcctagcaacatggctgtccagggaagaaactacatacctggacccagctaccgacaacaacgtgtctcaaccactgtgactcaaaacaacaacagcgaatttgcttggcctggagcttcttcttgggctctcaatggacgtaatagcttgatgaatcctggacctgctatggccagccacaaagaaggagaggaccgtttctttcctttgtctggatctttaatttttggcaaacaaggaactggaagagacaacgtggatgcggacaaagtcatgataaccaacgaagaagaaattaaaactactaacccggtagcaacggagtcctatggacaagtggccacaaaccaccagagtgcccaagcacaggcgcagaccggctgggttcaaaaccaaggaatacttccgggtatggtttggcaggacagagatgtgtacctgcaaggacccatttgggccaaaattcctcacacggacggcaactttcacccttctccgctgatgggagggtttggaatgaagcacccgcctcctcagatcctcatcaaaaacacacctgtacctgcggatcctccaacggccttcaacaaggacaagctgaactctttcatcacccagtattctactggccaagtcagcgtggagatcgagtgggagctgcagaaggaaaacagcaagcgctggaacccggagatccagtacacttccaactattacaagtctaataatgttgaatttgctgttaatactgaaggtgtatatagtgaaccccgccccattggcacgcggtatttaacgaggaactta

SEQ ID NO: 26 - DNA, 2226 bp, synthetic construct
  source 1..2226: mol_type = other DNA
atggctgccgatggttatcttccagattggctcgaggacaaccttagtgaaggaattcgcgagtggtgggctttgaaacctggagcccctcaacccaaggcaaatcaacaacatcaagacaacgctcgaggtcttgtgcttccgggttacaaataccttggacccggcaacggactcgacaagggggagccggtcaacgcagcagacgcggcggccctcgagcacgacaaggcctacgaccagcagctcaaggccggagacaacccgtacctcaagtacaaccacgccgacgccgagttccaggagcggctcaaagaagatacgtcttttgggggcaacctcgggcgagcagtcttccaggccaaaaagaggcttcttgaacctcttggtctggttgaggaagcggctaagacggctcctggaaagaagaggcctgtagagcagtctcctcaggaaccggactcctccgcgggtattggcaaatcgggtgcacagcccgctaaaaagagactcaatttcggtcagactggcgacacagagtcagtcccagaccctcaaccaatcggagaacctcccgcagccccctcaggtgtgggatctcttacaatggcttcaggtggtggcgcaccagtggcagacaataacgaaggtgccgatggagtgggtagttcctcgggaaattggcattgcgattcccaatggctgggggacagagtcatcaccaccagcacccgaacctgggccctgcccacctacaacaatcacctctacaagcaaatctccaacagcacatctggaggatcttcaaatgacaacgcctacttcggctacagcaccccctgggggtattttgacttcaacagattccactgccacttctcaccacgtgactggcagcgactcatcaacaacaactggggattccggcctaagcgactcaacttcaagctcttcaacattcaggtcaaagaggttacggacaacaatggagtcaagaccatcgccaataaccttaccagcacggtccaggtcttcacggactcagactatcagctcccgtacgtgctcgggtcggctcacgagggctgcctcccgccgttcccagcggacgttttcatgattcctcagtacgggtatctgacgcttaatgatggaagccaggccgtgggtcgttcgtccttttactgcctggaatatttcccgtcgcaaatgctaagaacgggtaacaacttccagttcagctacgagtttgagaacgtacctttccatagcagctacgctcacagccaaagcctggaccgactaatgaatccactcatcgatcagtatctgtattacttgagtaagggtctgggtggttctggttctccgcattctaaggcgcagaatcagcagacgttgaagttttcggtagctggtcctagcaacatggctgtccagggaagaaactacatacctggacccagctaccgacaacaacgtgtctcaaccactgtgactcaaaacaacaacagcgaatttgcttggcctggagcttcttcttgggctctcaatggacgtaatagcttgatgaatcctggacctgctatggccagccacaaagaaggagaggaccgtttctttcctttgtctggatctttaatttttggcaaacaaggaactggaagagacaacgtggatgcggacaaagtcatgataaccaacgaagaagaaattaaaactactaacccggtagcaacggagtcctatggacaagtggccacaaaccaccagagtgcccaagcacaggcgcagaccggctgggttcaaaaccaaggaatacttccgggtatggtttggcaggacagagatgtgtacctgcaaggacccatttgggccaaaattcctcacacggacggcaactttcacccttctccgctgatgggagggtttggaatgaagcacccgcctcctcagatcctcatcaaaaacacacctgtacctgcggatcctccaacggccttcaacaaggacaagctgaactctttcatcacccagtattctactggccaagtcagcgtggagatcgagtgggagctgcagaaggaaaacagcaagcgctggaacccggagatccagtacacttccaactattacaagtctaataatgttgaatttgctgttaatactgaaggtgtatatagtgaaccccgccccattggcacgcggtatttaacgaggaactta

SEQ ID NO: 27 - DNA, 2226 bp, synthetic construct
  source 1..2226: mol_type = other DNA
atggctgccgatggttatcttccagattggctcgaggacaaccttagtgaaggaattcgcgagtggtgggctttgaaacctggagcccctcaacccaaggcaaatcaacaacatcaagacaacgctcgaggtcttgtgcttccgggttacaaataccttggacccggcaacggactcgacaagggggagccggtcaacgcagcagacgcggcggccctcgagcacgacaaggcctacgaccagcagctcaaggccggagacaacccgtacctcaagtacaaccacgccgacgccgagttccaggagcggctcaaagaagatacgtcttttgggggcaacctcgggcgagcagtcttccaggccaaaaagaggcttcttgaacctcttggtctggttgaggaagcggctaagacggctcctggaaagaagaggcctgtagagcagtctcctcaggaaccggactcctccgcgggtattggcaaatcgggtgcacagcccgctaaaaagagactcaatttcggtcagactggcgacacagagtcagtcccagaccctcaaccaatcggagaacctcccgcagccccctcaggtgtgggatctcttacaatggcttcaggtggtggcgcaccagtggcagacaataacgaaggtgccgatggagtgggtagttcctcgggaaattggcattgcgattcccaatggctgggggacagagtcatcaccaccagcacccgaacctgggccctgcccacctacaacaatcacctctacaagcaaatctccaacagcacatctggaggatcttcaaatgacaacgcctacttcggctacagcaccccctgggggtattttgacttcaacagattccactgccacttctcaccacgtgactggcagcgactcatcaacaacaactggggattccggcctaagcgactcaacttcaagctcttcaacattcaggtcaaagaggttacggacaacaatggagtcaagaccatcgccaataaccttaccagcacggtccaggtcttcacggactcagactatcagctcccgtacgtgctcgggtcggctcacgagggctgcctcccgccgttcccagcggacgttttcatgattcctcagtacgggtatctgacgcttaatgatggaagccaggccgtgggtcgttcgtccttttactgcctggaatatttcccgtcgcaaatgctaagaacgggtaacaacttccagttcagctacgagtttgagaacgtacctttccatagcagctacgctcacagccaaagcctggaccgactaatgaatccactcatcgatcagtatctgtattacttgagtaagacgattaatggtcatgattctccgcattctaaggcgcagaatctgcagacgttgaagttttcggtagctggtcctagcaacatggctgtccagggaagaaactacatacctggacccagctaccgacaacaacgtgtctcaaccactgtgactcaaaacaacaacagcgaatttgcttggcctggagcttcttcttgggctctcaatggacgtaatagcttgatgaatcctggacctgctatggccagccacaaagaaggagaggaccgtttctttcctttgtctggatctttaatttttggcaaacaaggaactggaagagacaacgtggatgcggacaaagtcatgataaccaacgaagaagaaattaaaactactaacccggtagcaacggagtcctatggacaagtggccacaaaccaccagagtgcccaagcacaggcgcagaccggctgggttcaaaaccaaggaatacttccgggtatggtttggcaggacagagatgtgtacctgcaaggacccatttgggccaaaattcctcacacggacggcaactttcacccttctccgctgatgggagggtttggaatgaagcacccgcctcctcagatcctcatcaaaaacacacctgtacctgcggatcctccaacggccttcaacaaggacaagctgaactctttcatcacccagtattctactggccaagtcagcgtggagatcgagtgggagctgcagaaggaaaacagcaagcgctggaacccggagatccagtacacttccaactattacaagtctaataatgttgaatttgctgttaatactgaaggtgtatatagtgaaccccgccccattggcacgcggtatttaacgaggaactta

SEQ ID NO: 28 - DNA, 2226 bp, synthetic construct
  source 1..2226: mol_type = other DNA
atggctgccgatggttatcttccagattggctcgaggacaaccttagtgaaggaattcgcgagtggtgggctttgaaacctggagcccctcaacccaaggcaaatcaacaacatcaagacaacgctcgaggtcttgtgcttccgggttacaaataccttggacccggcaacggactcgacaagggggagccggtcaacgcagcagacgcggcggccctcgagcacgacaaggcctacgaccagcagctcaaggccggagacaacccgtacctcaagtacaaccacgccgacgccgagttccaggagcggctcaaagaagatacgtcttttgggggcaacctcgggcgagcagtcttccaggccaaaaagaggcttcttgaacctcttggtctggttgaggaagcggctaagacggctcctggaaagaagaggcctgtagagcagtctcctcaggaaccggactcctccgcgggtattggcaaatcgggtgcacagcccgctaaaaagagactcaatttcggtcagactggcgacacagagtcagtcccagaccctcaaccaatcggagaacctcccgcagccccctcaggtgtgggatctcttacaatggcttcaggtggtggcgcaccagtggcagacaataacgaaggtgccgatggagtgggtagttcctcgggaaattggcattgcgattcccaatggctgggggacagagtcatcaccaccagcacccgaacctgggccctgcccacctacaacaatcacctctacaagcaaatctccaacagcacatctggaggatcttcaaatgacaacgcctacttcggctacagcaccccctgggggtattttgacttcaacagattccactgccacttctcaccacgtgactggcagcgactcatcaacaacaactggggattccggcctaagcgactcaacttcaagctcttcaacattcaggtcaaagaggttacggacaacaatggagtcaagaccatcgccaataaccttaccagcacggtccaggtcttcacggactcagactatcagctcccgtacgtgctcgggtcggctcacgagggctgcctcccgccgttcccagcggacgttttcatgattcctcagtacgggtatctgacgcttaatgatggaagccaggccgtgggtcgttcgtccttttactgcctggaatatttcccgtcgcaaatgctaagaacgggtaacaacttccagttcagctacgagtttgagaacgtacctttccatagcagctacgctcacagccaaagcctggaccgactaatgaatccactcatcgatcagtatctgtattacttgagtaagacggtgaatggtcatgattctccgcattctaaggcgcagaatcagcagacgttgaagttttcggtagctggtcctagcaacatggctgtccagggaagaaactacatacctggacccagctaccgacaacaacgtgtctcaaccactgtgactcaaaacaacaacagcgaatttgcttggcctggagcttcttcttgggctctcaatggacgtaatagcttgatgaatcctggacctgctatggccagccacaaagaaggagaggaccgtttctttcctttgtctggatctttaatttttggcaaacaaggaactggaagagacaacgtggatgcggacaaagtcatgataaccaacgaagaagaaattaaaactactaacccggtagcaacggagtcctatggacaagtggccacaaaccaccagagtgcccaagcacaggcgcagaccggctgggttcaaaaccaaggaatacttccgggtatggtttggcaggacagagatgtgtacctgcaaggacccatttgggccaaaattcctcacacggacggcaactttcacccttctccgctgatgggagggtttggaatgaagcacccgcctcctcagatcctcatcaaaaacacacctgtacctgcggatcctccaacggccttcaacaaggacaagctgaactctttcatcacccagtattctactggccaagtcagcgtggagatcgagtgggagctgcagaaggaaaacagcaagcgctggaacccggagatccagtacacttccaactattacaagtctaataatgttgaatttgctgttaatactgaaggtgtatatagtgaaccccgccccattggcacgcggtatttaacgaggaactta

SEQ ID NO: 29 - DNA, 2226 bp, synthetic construct
  source 1..2226: mol_type = other DNA
atggctgccgatggttatcttccagattggctcgaggacaaccttagtgaaggaattcgcgagtggtgggctttgaaacctggagcccctcaacccaaggcaaatcaacaacatcaagacaacgctcgaggtcttgtgcttccgggttacaaataccttggacccggcaacggactcgacaagggggagccggtcaacgcagcagacgcggcggccctcgagcacgacaaggcctacgaccagcagctcaaggccggagacaacccgtacctcaagtacaaccacgccgacgccgagttccaggagcggctcaaagaagatacgtcttttgggggcaacctcgggcgagcagtcttccaggccaaaaagaggcttcttgaacctcttggtctggttgaggaagcggctaagacggctcctggaaagaagaggcctgtagagcagtctcctcaggaaccggactcctccgcgggtattggcaaatcgggtgcacagcccgctaaaaagagactcaatttcggtcagactggcgacacagagtcagtcccagaccctcaaccaatcggagaacctcccgcagccccctcaggtgtgggatctcttacaatggcttcaggtggtggcgcaccagtggcagacaataacgaaggtgccgatggagtgggtagttcctcgggaaattggcattgcgattcccaatggctgggggacagagtcatcaccaccagcacccgaacctgggccctgcccacctacaacaatcacctctacaagcaaatctccaacagcacatctggaggatcttcaaatgacaacgcctacttcggctacagcaccccctgggggtattttgacttcaacagattccactgccacttctcaccacgtgactggcagcgactcatcaacaacaactggggattccggcctaagcgactcaacttcaagctcttcaacattcaggtcaaagaggttacggacaacaatggagtcaagaccatcgccaataaccttaccagcacggtccaggtcttcacggactcagactatcagctcccgtacgtgctcgggtcggctcacgagggctgcctcccgccgttcccagcggacgttttcatgattcctcagtacgggtatctgacgcttaatgatggaagccaggccgtgggtcgttcgtccttttactgcctggaatatttcccgtcgcaaatgctaagaacgggtaacaacttccagttcagctacgagtttgagaacgtacctttccatagcagctacgctcacagccaaagcctggaccgactaatgaatccactcatcgatcagtatctgtattacttgagtaagacgattaatggtcatgattctccgcattctaaggcgctgaatcagcagacgttgaagttttcggtagctggtcctagcaacatggctgtccagggaagaaactacatacctggacccagctaccgacaacaacgtgtctcaaccactgtgactcaaaacaacaacagcgaatttgcttggcctggagcttcttcttgggctctcaatggacgtaatagcttgatgaatcctggacctgctatggccagccacaaagaaggagaggaccgtttctttcctttgtctggatctttaatttttggcaaacaaggaactggaagagacaacgtggatgcggacaaagtcatgataaccaacgaagaagaaattaaaactactaacccggtagcaacggagtcctatggacaagtggccacaaaccaccagagtgcccaagcacaggcgcagaccggctgggttcaaaaccaaggaatacttccgggtatggtttggcaggacagagatgtgtacctgcaaggacccatttgggccaaaattcctcacacggacggcaactttcacccttctccgctgatgggagggtttggaatgaagcacccgcctcctcagatcctcatcaaaaacacacctgtacctgcggatcctccaacggccttcaacaaggacaagctgaactctttcatcacccagtattctactggccaagtcagcgtggagatcgagtgggagctgcagaaggaaaacagcaagcgctggaacccggagatccagtacacttccaactattacaagtctaataatgttgaatttgctgttaatactgaaggtgtatatagtgaaccccgccccattggcacgcggtatttaacgaggaactta

SEQ ID NO: 30 - DNA, 2226 bp, synthetic construct
  source 1..2226: mol_type = other DNA
atggctgccgatggttatcttccagattggctcgaggacaaccttagtgaaggaattcgcgagtggtgggctttgaaacctggagcccctcaacccaaggcaaatcaacaacatcaagacaacgctcgaggtcttgtgcttccgggttacaaataccttggacccggcaacggactcgacaagggggagccggtcaacgcagcagacgcggcggccctcgagcacgacaaggcctacgaccagcagctcaaggccggagacaacccgtacctcaagtacaaccacgccgacgccgagttccaggagcggctcaaagaagatacgtcttttgggggcaacctcgggcgagcagtcttccaggccaaaaagaggcttcttgaacctcttggtctggttgaggaagcggctaagacggctcctggaaagaagaggcctgtagagcagtctcctcaggaaccggactcctccgcgggtattggcaaatcgggtgcacagcccgctaaaaagagactcaatttcggtcagactggcgacacagagtcagtcccagaccctcaaccaatcggagaacctcccgcagccccctcaggtgtgggatctcttacaatggcttcaggtggtggcgcaccagtggcagacaataacgaaggtgccgatggagtgggtagttcctcgggaaattggcattgcgattcccaatggctgggggacagagtcatcaccaccagcacccgaacctgggccctgcccacctacaacaatcacctctacaagcaaatctccaacagcacatctggaggatcttcaaatgacaacgcctacttcggctacagcaccccctgggggtattttgacttcaacagattccactgccacttctcaccacgtgactggcagcgactcatcaacaacaactggggattccggcctaagcgactcaacttcaagctcttcaacattcaggtcaaagaggttacggacaacaatggagtcaagaccatcgccaataaccttaccagcacggtccaggtcttcacggactcagactatcagctcccgtacgtgctcgggtcggctcacgagggctgcctcccgccgttcccagcggacgttttcatgattcctcagtacgggtatctgacgcttaatgatggaagccaggccgtgggtcgttcgtccttttactgcctggaatatttcccgtcgcaaatgctaagaacgggtaacaacttccagttcagctacgagtttgagaacgtacctttccatagcagctacgctcacagccaaagcctggaccgactaatgaatccactcatcgatcagtatctgtattacttgagtaagacgattaatggtcatgattctccgcattctaaggcgcagaatcagcagtctttgaagttttcggtagctggtcctagcaacatggctgtccagggaagaaactacatacctggacccagctaccgacaacaacgtgtctcaaccactgtgactcaaaacaacaacagcgaatttgcttggcctggagcttcttcttgggctctcaatggacgtaatagcttgatgaatcctggacctgctatggccagccacaaagaaggagaggaccgtttctttcctttgtctggatctttaatttttggcaaacaaggaactggaagagacaacgtggatgcggacaaagtcatgataaccaacgaagaagaaattaaaactactaacccggtagcaacggagtcctatggacaagtggccacaaaccaccagagtgcccaagcacaggcgcagaccggctgggttcaaaaccaaggaatacttccgggtatggtttggcaggacagagatgtgtacctgcaaggacccatttgggccaaaattcctcacacggacggcaactttcacccttctccgctgatgggagggtttggaatgaagcacccgcctcctcagatcctcatcaaaaacacacctgtacctgcggatcctccaacggccttcaacaaggacaagctgaactctttcatcacccagtattctactggccaagtcagcgtggagatcgagtgggagctgcagaaggaaaacagcaagcgctggaacccggagatccagtacacttccaactattacaagtctaataatgttgaatttgctgttaatactgaaggtgtatatagtgaaccccgccccattggcacgcggtatttaacgaggaactta

SEQ ID NO: 31 - DNA, 2226 bp, synthetic construct
  source 1..2226: mol_type = other DNA
atggctgccgatggttatcttccagattggctcgaggacaaccttagtgaaggaattcgcgagtggtgggctttgaaacctggagcccctcaacccaaggcaaatcaacaacatcaagacaacgctcgaggtcttgtgcttccgggttacaaataccttggacccggcaacggactcgacaagggggagccggtcaacgcagcagacgcggcggccctcgagcacgacaaggcctacgaccagcagctcaaggccggagacaacccgtacctcaagtacaaccacgccgacgccgagttccaggagcggctcaaagaagatacgtcttttgggggcaacctcgggcgagcagtcttccaggccaaaaagaggcttcttgaacctcttggtctggttgaggaagcggctaagacggctcctggaaagaagaggcctgtagagcagtctcctcaggaaccggactcctccgcgggtattggcaaatcgggtgcacagcccgctaaaaagagactcaatttcggtcagactggcgacacagagtcagtcccagaccctcaaccaatcggagaacctcccgcagccccctcaggtgtgggatctcttacaatggcttcaggtggtggcgcaccagtggcagacaataacgaaggtgccgatggagtgggtagttcctcgggaaattggcattgcgattcccaatggctgggggacagagtcatcaccaccagcacccgaacctgggccctgcccacctacaacaatcacctctacaagcaaatctccaacagcacatctggaggatcttcaaatgacaacgcctacttcggctacagcaccccctgggggtattttgacttcaacagattccactgccacttctcaccacgtgactggcagcgactcatcaacaacaactggggattccggcctaagcgactcaacttcaagctcttcaacattcaggtcaaagaggttacggacaacaatggagtcaagaccatcgccaataaccttaccagcacggtccaggtcttcacggactcagactatcagctcccgtacgtgctcgggtcggctcacgagggctgcctcccgccgttcccagcggacgttttcatgattcctcagtacgggtatctgacgcttaatgatggaagccaggccgtgggtcgttcgtccttttactgcctggaatatttcccgtcgcaaatgctaagaacgggtaacaacttccagttcagctacgagtttgagaacgtacctttccatagcagctacgctcacagccaaagcctggaccgactaatgaatccactcatcgatcagtatctgtattacttgagtaagacgattaatggtcatgattctccgcattctaaggcgcagaatcagcagattttgaagttttcggtagctggtcctagcaacatggctgtccagggaagaaactacatacctggacccagctaccgacaacaacgtgtctcaaccactgtgactcaaaacaacaacagcgaatttgcttggcctggagcttcttcttgggctctcaatggacgtaatagcttgatgaatcctggacctgctatggccagccacaaagaaggagaggaccgtttctttcctttgtctggatctttaatttttggcaaacaaggaactggaagagacaacgtggatgcggacaaagtcatgataaccaacgaagaagaaattaaaactactaacccggtagcaacggagtcctatggacaagtggccacaaaccaccagagtgcccaagcacaggcgcagaccggctgggttcaaaaccaaggaatacttccgggtatggtttggcaggacagagatgtgtacctgcaaggacccatttgggccaaaattcctcacacggacggcaactttcacccttctccgctgatgggagggtttggaatgaagcacccgcctcctcagatcctcatcaaaaacacacctgtacctgcggatcctccaacggccttcaacaaggacaagctgaactctttcatcacccagtattctactggccaagtcagcgtggagatcgagtgggagctgcagaaggaaaacagcaagcgctggaacccggagatccagtacacttccaactattacaagtctaataatgttgaatttgctgttaatactgaaggtgtatatagtgaaccccgccccattggcacgcggtatttaacgaggaactta

SEQ ID NO: 32 - DNA, 2226 bp, synthetic construct
  source 1..2226: mol_type = other DNA
atggctgccgatggttatcttccagattggctcgaggacaaccttagtgaaggaattcgcgagtggtgggctttgaaacctggagcccctcaacccaaggcaaatcaacaacatcaagacaacgctcgaggtcttgtgcttccgggttacaaataccttggacccggcaacggactcgacaagggggagccggtcaacgcagcagacgcggcggccctcgagcacgacaaggcctacgaccagcagctcaaggccggagacaacccgtacctcaagtacaaccacgccgacgccgagttccaggagcggctcaaagaagatacgtcttttgggggcaacctcgggcgagcagtcttccaggccaaaaagaggcttcttgaacctcttggtctggttgaggaagcggctaagacggctcctggaaagaagaggcctgtagagcagtctcctcaggaaccggactcctccgcgggtattggcaaatcgggtgcacagcccgctaaaaagagactcaatttcggtcagactggcgacacagagtcagtcccagaccctcaaccaatcggagaacctcccgcagccccctcaggtgtgggatctcttacaatggcttcaggtggtggcgcaccagtggcagacaataacgaaggtgccgatggagtgggtagttcctcgggaaattggcattgcgattcccaatggctgggggacagagtcatcaccaccagcacccgaacctgggccctgcccacctacaacaatcacctctacaagcaaatctccaacagcacatctggaggatcttcaaatgacaacgcctacttcggctacagcaccccctgggggtattttgacttcaacagattccactgccacttctcaccacgtgactggcagcgactcatcaacaacaactggggattccggcctaagcgactcaacttcaagctcttcaacattcaggtcaaagaggttacggacaacaatggagtcaagaccatcgccaataaccttaccagcacggtccaggtcttcacggactcagactatcagctcccgtacgtgctcgggtcggctcacgagggctgcctcccgccgttcccagcggacgttttcatgattcctcagtacgggtatctgacgcttaatgatggaagccaggccgtgggtcgttcgtccttttactgcctggaatatttcccgtcgcaaatgctaagaacgggtaacaacttccagttcagctacgagtttgagaacgtacctttccatagcagctacgctcacagccaaagcctggaccgactaatgaatccactcatcgatcagtatctgtattacttgagtaagacgattaatggttctggttctccgcattttacgcgtcagaatcagcagacgttgaagttttcggtagctggtcctagcaacatggctgtccagggaagaaactacatacctggacccagctaccgacaacaacgtgtctcaaccactgtgactcaaaacaacaacagcgaatttgcttggcctggagcttcttcttgggctctcaatggacgtaatagcttgatgaatcctggacctgctatggccagccacaaagaaggagaggaccgtttctttcctttgtctggatctttaatttttggcaaacaaggaactggaagagacaacgtggatgcggacaaagtcatgataaccaacgaagaagaaattaaaactactaacccggtagcaacggagtcctatggacaagtggccacaaaccaccagagtgcccaagcacaggcgcagaccggctgggttcaaaaccaaggaatacttccgggtatggtttggcaggacagagatgtgtacctgcaaggacccatttgggccaaaattcctcacacggacggcaactttcacccttctccgctgatgggagggtttggaatgaagcacccgcctcctcagatcctcatcaaaaacacacctgtacctgcggatcctccaacggccttcaacaaggacaagctgaactctttcatcacccagtattctactggccaagtcagcgtggagatcgagtgggagctgcagaaggaaaacagcaagcgctggaacccggagatccagtacacttccaactattacaagtctaataatgttgaatttgctgttaatactgaaggtgtatatagtgaaccccgccccattggcacgcggtatttaacgaggaactta

SEQ ID NO: 33 - DNA, 2226 bp, synthetic construct
  source 1..2226: mol_type = other DNA
atggctgccgatggttatcttccagattggctcgaggacaaccttagtgaaggaattcgcgagtggtgggctttgaaacctggagcccctcaacccaaggcaaatcaacaacatcaagacaacgctcgaggtcttgtgcttccgggttacaaataccttggacccggcaacggactcgacaagggggagccggtcaacgcagcagacgcggcggccctcgagcacgacaaggcctacgaccagcagctcaaggccggagacaacccgtacctcaagtacaaccacgccgacgccgagttccaggagcggctcaaagaagatacgtcttttgggggcaacctcgggcgagcagtcttccaggccaaaaagaggcttcttgaacctcttggtctggttgaggaagcggctaagacggctcctggaaagaagaggcctgtagagcagtctcctcaggaaccggactcctccgcgggtattggcaaatcgggtgcacagcccgctaaaaagagactcaatttcggtcagactggcgacacagagtcagtcccagaccctcaaccaatcggagaacctcccgcagccccctcaggtgtgggatctcttacaatggcttcaggtggtggcgcaccagtggcagacaataacgaaggtgccgatggagtgggtagttcctcgggaaattggcattgcgattcccaatggctgggggacagagtcatcaccaccagcacccgaacctgggccctgcccacctacaacaatcacctctacaagcaaatctccaacagcacatctggaggatcttcaaatgacaacgcctacttcggctacagcaccccctgggggtattttgacttcaacagattccactgccacttctcaccacgtgactggcagcgactcatcaacaacaactggggattccggcctaagcgactcaacttcaagctcttcaacattcaggtcaaagaggttacggacaacaatggagtcaagaccatcgccaataaccttaccagcacggtccaggtcttcacggactcagactatcagctcccgtacgtgctcgggtcggctcacgagggctgcctcccgccgttcccagcggacgttttcatgattcctcagtacgggtatctgacgcttaatgatggaagccaggccgtgggtcgttcgtccttttactgcctggaatatttcccgtcgcaaatgctaagaacgggtaacaacttccagttcagctacgagtttgagaacgtacctttccatagcagctacgctcacagccaaagcctggaccgactaatgaatccactcatcgatcagtatctgtattacttgagtaagacgtctaatggtcatgattctccgcattctaaggcgcagaatcagcagacgttgaagttttcggtagctggtcctagcaacatggctgtccagggaagaaactacatacctggacccagctaccgacaacaacgtgtctcaaccactgtgactcaaaacaacaacagcgaatttgcttggcctggagcttcttcttgggctctcaatggacgtaatagcttgatgaatcctggacctgctatggccagccacaaagaaggagaggaccgtttctttcctttgtctggatctttaatttttggcaaacaaggaactggaagagacaacgtggatgcggacaaagtcatgataaccaacgaagaagaaattaaaactactaacccggtagcaacggagtcctatggacaagtggccacaaaccaccagagtgcccaagcacaggcgcagaccggctgggttcaaaaccaaggaatacttccgggtatggtttggcaggacagagatgtgtacctgcaaggacccatttgggccaaaattcctcacacggacggcaactttcacccttctccgctgatgggagggtttggaatgaagcacccgcctcctcagatcctcatcaaaaacacacctgtacctgcggatcctccaacggccttcaacaaggacaagctgaactctttcatcacccagtattctactggccaagtcagcgtggagatcgagtgggagctgcagaaggaaaacagcaagcgctggaacccggagatccagtacacttccaactattacaagtctaataatgttgaatttgctgttaatactgaaggtgtatatagtgaaccccgccccattggcacgcggtatttaacgaggaactta

SEQ ID NO: 34 - DNA, 2226 bp, synthetic construct
  source 1..2226: mol_type = other DNA
atggctgccgatggttatcttccagattggctcgaggacaaccttagtgaaggaattcgcgagtggtgggctttgaaacctggagcccctcaacccaaggcaaatcaacaacatcaagacaacgctcgaggtcttgtgcttccgggttacaaataccttggacccggcaacggactcgacaagggggagccggtcaacgcagcagacgcggcggccctcgagcacgacaaggcctacgaccagcagctcaaggccggagacaacccgtacctcaagtacaaccacgccgacgccgagttccaggagcggctcaaagaagatacgtcttttgggggcaacctcgggcgagcagtcttccaggccaaaaagaggcttcttgaacctcttggtctggttgaggaagcggctaagacggctcctggaaagaagaggcctgtagagcagtctcctcaggaaccggactcctccgcgggtattggcaaatcgggtgcacagcccgctaaaaagagactcaatttcggtcagactggcgacacagagtcagtcccagaccctcaaccaatcggagaacctcccgcagccccctcaggtgtgggatctcttacaatggcttcaggtggtggcgcaccagtggcagacaataacgaaggtgccgatggagtgggtagttcctcgggaaattggcattgcgattcccaatggctgggggacagagtcatcaccaccagcacccgaacctgggccctgcccacctacaacaatcacctctacaagcaaatctccaacagcacatctggaggatcttcaaatgacaacgcctacttcggctacagcaccccctgggggtattttgacttcaacagattccactgccacttctcaccacgtgactggcagcgactcatcaacaacaactggggattccggcctaagcgactcaacttcaagctcttcaacattcaggtcaaagaggttacggacaacaatggagtcaagaccatcgccaataaccttaccagcacggtccaggtcttcacggactcagactatcagctcccgtacgtgctcgggtcggctcacgagggctgcctcccgccgttcccagcggacgttttcatgattcctcagtacgggtatctgacgcttaatgatggaagccaggccgtgggtcgttcgtccttttactgcctggaatatttcccgtcgcaaatgctaagaacgggtaacaacttccagttcagctacgagtttgagaacgtacctttccatagcagctacgctcacagccaaagcctggaccgactaatgaatccactcatcgatcagtatctgtattacttgagtaagacgattaatggttctggttctccgcattctctgccgtggaatcagcagacgttgaagttttcggtagctggtcctagcaacatggctgtccagggaagaaactacatacctggacccagctaccgacaacaacgtgtctcaaccactgtgactcaaaacaacaacagcgaatttgcttggcctggagcttcttcttgggctctcaatggacgtaatagcttgatgaatcctggacctgctatggccagccacaaagaaggagaggaccgtttctttcctttgtctggatctttaatttttggcaaacaaggaactggaagagacaacgtggatgcggacaaagtcatgataaccaacgaagaagaaattaaaactactaacccggtagcaacggagtcctatggacaagtggccacaaaccaccagagtgcccaagcacaggcgcagaccggctgggttcaaaaccaaggaatacttccgggtatggtttggcaggacagagatgtgtacctgcaaggacccatttgggccaaaattcctcacacggacggcaactttcacccttctccgctgatgggagggtttggaatgaagcacccgcctcctcagatcctcatcaaaaacacacctgtacctgcggatcctccaacggccttcaacaaggacaagctgaactctttcatcacccagtattctactggccaagtcagcgtggagatcgagtgggagctgcagaaggaaaacagcaagcgctggaacccggagatccagtacacttccaactattacaagtctaataatgttgaatttgctgttaatactgaaggtgtatatagtgaaccccgccccattggcacgcggtatttaacgaggaactta

SEQ ID NO: 35 - DNA, 2226 bp, synthetic construct
  source 1..2226: mol_type = other DNA
atggctgccgatggttatcttccagattggctcgaggacaaccttagtgaaggaattcgcgagtggtgggctttgaaacctggagcccctcaacccaaggcaaatcaacaacatcaagacaacgctcgaggtcttgtgcttccgggttacaaataccttggacccggcaacggactcgacaagggggagccggtcaacgcagcagacgcggcggccctcgagcacgacaaggcctacgaccagcagctcaaggccggagacaacccgtacctcaagtacaaccacgccgacgccgagttccaggagcggctcaaagaagatacgtcttttgggggcaacctcgggcgagcagtcttccaggccaaaaagaggcttcttgaacctcttggtctggttgaggaagcggctaagacggctcctggaaagaagaggcctgtagagcagtctcctcaggaaccggactcctccgcgggtattggcaaatcgggtgcacagcccgctaaaaagagactcaatttcggtcagactggcgacacagagtcagtcccagaccctcaaccaatcggagaacctcccgcagccccctcaggtgtgggatctcttacaatggcttcaggtggtggcgcaccagtggcagacaataacgaaggtgccgatggagtgggtagttcctcgggaaattggcattgcgattcccaatggctgggggacagagtcatcaccaccagcacccgaacctgggccctgcccacctacaacaatcacctctacaagcaaatctccaacagcacatctggaggatcttcaaatgacaacgcctacttcggctacagcaccccctgggggtattttgacttcaacagattccactgccacttctcaccacgtgactggcagcgactcatcaacaacaactggggattccggcctaagcgactcaacttcaagctcttcaacattcaggtcaaagaggttacggacaacaatggagtcaagaccatcgccaataaccttaccagcacggtccaggtcttcacggactcagactatcagctcccgtacgtgctcgggtcggctcacgagggctgcctcccgccgttcccagcggacgttttcatgattcctcagtacgggtatctgacgcttaatgatggaagccaggccgtgggtcgttcgtccttttactgcctggaatatttcccgtcgcaaatgctaagaacgggtaacaacttccagttcagctacgagtttgagaacgtacctttccatagcagctacgctcacagccaaagcctggaccgactaatgaatccactcatcgatcagtatctgtattacttgagtaagacgattaatggtcatgattctccgcattctaaggcgcagaatcatcagacgttgaagttttcggtagctggtcctagcaacatggctgtccagggaagaaactacatacctggacccagctaccgacaacaacgtgtctcaaccactgtgactcaaaacaacaacagcgaatttgcttggcctggagcttcttcttgggctctcaatggacgtaatagcttgatgaatcctggacctgctatggccagccacaaagaaggagaggaccgtttctttcctttgtctggatctttaatttttggcaaacaaggaactggaagagacaacgtggatgcggacaaagtcatgataaccaacgaagaagaaattaaaactactaacccggtagcaacggagtcctatggacaagtggccacaaaccaccagagtgcccaagcacaggcgcagaccggctgggttcaaaaccaaggaatacttccgggtatggtttggcaggacagagatgtgtacctgcaaggacccatttgggccaaaattcctcacacggacggcaactttcacccttctccgctgatgggagggtttggaatgaagcacccgcctcctcagatcctcatcaaaaacacacctgtacctgcggatcctccaacggccttcaacaaggacaagctgaactctttcatcacccagtattctactggccaagtcagcgtggagatcgagtgggagctgcagaaggaaaacagcaagcgctggaacccggagatccagtacacttccaactattacaagtctaataatgttgaatttgctgttaatactgaaggtgtatatagtgaaccccgccccattggcacgcggtatttaacgaggaactta

SEQ ID NO: 36 - protein, 742 aa, synthetic construct
MAADGYLPDWLEDNLSEGIREWWALKPGAPQPKANQQHQDNARGLVLPGYKYLGPGNGLDKGEPVNAADAAALEHDKAYDQQLKAGDNPYLKYNHADAEFQERLKEDTSFGGNLGRAVFQAKKRLLEPLGLVEEAAKTAPGKKRPVEQSPQEPDSSAGIGKSGAQPAKKRLNFGQTGDTESVPDPQPIGEPPAAPSGVGSLTMASGGGAPVADNNEGADGVGSSSGNWHCDSQWLGDRVITTSTRTWALPTYNNHLYKQISNSTSGGSSNDNAYFGYSTPWGYFDFNRFHCHFSPRDWQRLINNNWGFRPKRLNFKLFNIQVKEVTDNNGVKTIANNLTSTVQVFTDSDYQLPYVLGSAHEGCLPPFPADVFMIPQYGYLTLNDGSQAVGRSSFYCLEYFPSQMLRTGNNFQFSYEFENVPFHSSYAHSQSLDRLMNPLIDQYLYYLSKTERVSGSPHSKAQNQQTLKFSVAGPSNMAVQGRNYIPGPSYRQQRVSTTVTQNNNSEFAWPGASSWALNGRNSLMNPGPAMASHKEGEDRFFPLSGSLIFGKQGTGRDNVDADKVMITNEEEIKTTNPVATESYGQVATNHQSAQAQAQTGWVQNQGILPGMVWQDRDVYLQGPIWAKIPHTDGNFHPSPLMGGFGMKHPPPQILIKNTPVPADPPTAFNKDKLNSFITQYSTGQVSVEIEWELQKENSKRWNPEIQYTSNYYKSNNVEFAVNTEGVYSEPRPIGTRYLTRNL

SEQ ID NO: 37 - protein, 742 aa, synthetic construct
MAADGYLPDWLEDNLSEGIREWWALKPGAPQPKANQQHQDNARGLVLPGYKYLGPGNGLDKGEPVNAADAAALEHDKAYDQQLKAGDNPYLKYNHADAEFQERLKEDTSFGGNLGRAVFQAKKRLLEPLGLVEEAAKTAPGKKRPVEQSPQEPDSSAGIGKSGAQPAKKRLNFGQTGDTESVPDPQPIGEPPAAPSGVGSLTMASGGGAPVADNNEGADGVGSSSGNWHCDSQWLGDRVITTSTRTWALPTYNNHLYKQISNSTSGGSSNDNAYFGYSTPWGYFDFNRFHCHFSPRDWQRLINNNWGFRPKRLNFKLFNIQVKEVTDNNGVKTIANNLTSTVQVFTDSDYQLPYVLGSAHEGCLPPFPADVFMIPQYGYLTLNDGSQAVGRSSFYCLEYFPSQMLRTGNNFQFSYEFENVPFHSSYAHSQSLDRLMNPLIDQYLYYLSKAEIGHDSPHKSGQNQQTLKFSVAGPSNMAVQGRNYIPGPSYRQQRVSTTVTQNNNSEFAWPGASSWALNGRNSLMNPGPAMASHKEGEDRFFPLSGSLIFGKQGTGRDNVDADKVMITNEEEIKTTNPVATESYGQVATNHQSAQAQAQTGWVQNQGILPGMVWQDRDVYLQGPIWAKIPHTDGNFHPSPLMGGFGMKHPPPQILIKNTPVPADPPTAFNKDKLNSLITQYSTGQVSVEIEWELQKENSKRWNPEIQYTSNYYKSNNVEFAVNTEGVYSEPRPIGTRYLTRNL

SEQ ID NO: 38 - protein, 742 aa, synthetic construct
MAADGYLPDWLEDNLSEGIREWWALKPGAPQPKANQQHQDNARGLVLPGYKYLGPGNGLDKGEPVNAADAAALEHDKAYDQQLKAGDNPYLKYNHADAEFQERLKEDTSFGGNLGRAVFQAKKRLLEPLGLVEEAAKTAPGKKRPVEQSPQEPDSSAGIGKSGAQPAKKRLNFGQTGDTESVPDPQPIGEPPAAPSGVGSLTMASGGGAPVADNNEGADGVGSSSGNWHCDSQWLGDRVITTSTRTWALPTYNNHLYKQISNSTSGGSSNDNAYFGYSTPWGYFDFNRFHCHFSPRDWQRLINNNWGFRPKRLNFKLFNIQVKEVTDNNGVKTIANNLTSTVQVFTDSDYQLPYVLGSAHEGCLPPFPADVFMIPQYGYLTLNDGSQAVGRSSFYCLEYFPSQMLRTGNNFQFSYEFENVPFHSSYAHSQSLDRLMNPLIDQYLYYLSKTIIGSGSPHSKAQNRHTLKFSVAGPSNMAVQGRNYIPGPSYRQQRVSTTVTQNNNSEFAWPGASSWALNGRNSLMNPGPAMASHKEGEDRFFPLSGSLIFGKQGTGRDNVDADKVMITNEEEIKTTNPVATESYGQVATNHQSAQAQAQTGWVQNQGILPGMVWQDRDVYLQGPIWAKIPHTDGNFHPSPLMGGFGMKHPPPQILIKNTPVPADPPTAFNKDKLNSFITQYSTGQVSVEIEWELQKENSKRWNPEIQYTSNYYKSNNVEFAVNTEGVYSEPRPIGTRYLTRNL

SEQ ID NO: 39 - protein, 742 aa, synthetic construct
MAADGYLPDWLEDNLSEGIREWWALKPGAPQPKANQQHQDNARGLVLPGYKYLGPGNGLDKGEPVNAADAAALEHDKAYDQQLKAGDNPYLKYNHADAEFQERLKEDTSFGGNLGRAVFQAKKRLLEPLGLVEEAAKTAPGKKRPVEQSPQEPDSSAGIGKSGAQPAKKRLNFGQTGDTESVPDPQPIGEPPAAPSGVGSLTMASGGGAPVADNNEGADGVGSSSGNWHCDSQWLGDRVITTSTRTWALPTYNNHLYKQISNSTSGGSSNDNAYFGYSTPWGYFDFNRFHCHFSPRDWQRLINNNWGFRPKRLNFKLFNIQVKEVTDNNGVKTIANNLTSTVQVFTDSDYQLPYVLGSAHEGCLPPFPADVFMIPQYGYLTLNDGSQAVGRSSFYCLEYFPSQMLRTGNNFQFSYEFENVPFHSSYAHSQSLDRLMNPLIDQYLYYLSKTEKMSGSPHSKAQNQQTLKFSVAGPSNMAVQGRNYIPGPSYRQQRVSTTVTQNNNSEFAWPGASSWALNGRNSLMNPGPAMASHKEGEDRFFPLSGSLIFGKQGTGRDNVDADKVMITNEEEIKTTNPVATESYGQVATNHQSAQAQAQTGWVQNQGILPGMVWQDRDVYLQGPIWAKIPHTDGNFHPSPLMGGFGMKHPPPQILIKNTPVPADPPTAFNKDKLNSFITQYSTGQVSVEIEWELQKENSKRWNPEIQYTSNYYKSNNVEFAVNTEGVYSEPRPIGTRYLTRNL

SEQ ID NO: 40 - protein, 742 aa, synthetic construct
MAADGYLPDWLEDNLSEGIREWWALKPGAPQPKANQQHQDNARGLVLPGYKYLGPGNGLDKGEPVNAADAAALEHDKAYDQQLKAGDNPYLKYNHADAEFQERLKEDTSFGGNLGRAVFQAKKRLLEPLGLVEEAAKTAPGKKRPVEQSPQEPDSSAGIGKSGAQPAKKRLNFGQTGDTESVPDPQPIGEPPAAPSGVGSLTMASGGGAPVADNNEGADGVGSSSGNWHCDSQWLGDRVITTSTRTWALPTYNNHLYKQISNSTSGGSSNDNAYFGYSTPWGYFDFNRFHCHFSPRDWQRLINNNWGFRPKRLNFKLFNIQVKEVTDNNGVKTIANNLTSTVQVFTDSDYQLPYVLGSAHEGCLPPFPADVFMIPQYGYLTLNDGSQAVGRSSFYCLEYFPSQMLRTGNNFQFSYEFENVPFHSSYAHSQSLDRLMNPLIDQYLYYLSKEINGRGSPHSKAQNQQTLKFSVAGPSNMAVQGRNYIPGPSYRQQRVSTTVTQNNNSEFAWPGASSWALNGRNSLMNPGPAMASHKEGEDRFFPLSGSLIFGKQGTGRDNVDADKVMITNEEEIKTTNPVATESYGQVATNHQSAQAQAQTGWVQNQGILPGMVWQDRDVYLQGPIWAKIPHTDGNFHPSPLMGGFGMKHPPPQILIKNTPVPADPPTAFNKDKLNSFITQYSTGQVSVEIEWELQKENSKRWNPEIQYTSNYYKSNNVEFAVNTEGVYSEPRPIGTRYLTRNL

SEQ ID NO: 41 - protein, 742 aa, synthetic construct
MAADGYLPDWLEDNLSEGIREWWALKPGAPQPKANQQHQDNARGLVLPGYKYLGPGNGLDKGEPVNAADAAALEHDKAYDQQLKAGDNPYLKYNHADAEFQERLKEDTSFGGNLGRAVFQAKKRLLEPLGLVEEAAKTAPGKKRPVEQSPQEPDSSAGIGKSGAQPAKKRLNFGQTGDTESVPDPQPIGEPPAAPSGVGSLTMASGGGAPVADNNEGADGVGSSSGNWHCDSQWLGDRVITTSTRTWALPTYNNHLYKQISNSTSGGSSNDNAYFGYSTPWGYFDFNRFHCHFSPRDWQRLINNNWGFRPKRLNFKLFNIQVKEVTDNNGVKTIANNLTSTVQVFTDSDYQLPYVLGSAHEGCLPPFPADVFMIPQYGYLTLNDGSQAVGRSSFYCLEYFPSQMLRTGNNFQFSYEFENVPFHSSYAHSQSLDRLMNPLIDQYLYYLSKTFNGSGSPHSKAPNLQTLKFSVAGPSNMAVQGRNYIPGPSYRQQRVSTTVTQNNNSEFAWPGASSWALNGRNSLMNPGPAMASHKEGEDRFFPLSGSLIFGKQGTGRDNVDADKVMITNEEEIKTTNPVATESYGQVATNHQSAQAQAQTGWVQNQGILPGMVWQDRDVYLQGPIWAKIPHTDGNFHPSPLMGGFGMKHPPPQILIKNTPVPADPPTAFNKDKLNSFITQYSTGQVSVEIEWELQKENSKRWNPEIQYTSNYYKSNNVEFAVNTEGVYSEPRPIGTRYLTRNL

SEQ ID NO: 42 - protein, 742 aa, synthetic construct
MAADGYLPDWLEDNLSEGIREWWALKPGAPQPKANQQHQDNARGLVLPGYKYLGPGNGLDKGEPVNAADAAALEHDKAYDQQLKAGDNPYLKYNHADAEFQERLKEDTSFGGNLGRAVFQAKKRLLEPLGLVEEAAKTAPGKKRPVEQSPQEPDSSAGIGKSGAQPAKKRLNFGQTGDTESVPDPQPIGEPPAAPSGVGSLTMASGGGAPVADNNEGADGVGSSSGNWHCDSQWLGDRVITTSTRTWALPTYNNHLYKQISNSTSGGSSNDNAYFGYSTPWGYFDFNRFHCHFSPRDWQRLINNNWGFRPKRLNFKLFNIQVKEVTDNNGVKTIANNLTSTVQVFTDSDYQLPYVLGSAHEGCLPPFPADVFMIPQYGYLTLNDGSQAVGRSSFYCLEYFPSQMLRTGNNFQFSYEFENVPFHSSYAHSQSLDRLMNPLIDQYLYYLSKTEKTSGSPHSKAQNQQTLKFSVAGPSNMAVQGRNYIPGPSYRQQRVSTTVTQNNNSEFAWPGASSWALNGRNSLMNPGPAMASHKEGEDRFFPLSGSLIFGKQGTGRDNVDADKVMITNEEEIKTTNPVATESYGQVATNHQSAQAQAQTGWVQNQGILPGMVWQDRDVYLQGPIWAKIPHTDGNFHPSPLMGGFGMKHPPPQILIKNTPVPADPPTAFNKDKLNSFITQYSTGQVSVEIEWELQKENSKRWNPEIQYTSNYYKSNNVEFAVNTEGVYSEPRPIGTRYLTRNL

SEQ ID NO: 43 - protein, 742 aa, synthetic construct
MAADGYLPDWLEDNLSEGIREWWALKPGAPQPKANQQHQDNARGLVLPGYKYLGPGNGLDKGEPVNAADAAALEHDKAYDQQLKAGDNPYLKYNHADAEFQERLKEDTSFGGNLGRAVFQAKKRLLEPLGLVEEAAKTAPGKKRPVEQSPQEPDSSAGIGKSGAQPAKKRLNFGQTGDTESVPDPQPIGEPPAAPSGVGSLTMASGGGAPVADNNEGADGVGSSSGNWHCDSQWLGDRVITTSTRTWALPTYNNHLYKQISNSTSGGSSNDNAYFGYSTPWGYFDFNRFHCHFSPRDWQRLINNNWGFRPKRLNFKLFNIQVKEVTDNNGVKTIANNLTSTVQVFTDSDYQLPYVLGSAHEGCLPPFPADVFMIPQYGYLTLNDGSQAVGRSSFYCLEYFPSQMLRTGNNFQFSYEFENVPFHSSYAHSQSLDRLMNPLIDQYLYYLSKTMNGHDSPHSKAQNQQTLKFSVAGPSNMAVQGRNYIPGPSYRQQRVSTTVTQNNNSEFAWPGASSWALNGRNSLMNPGPAMASHKEGEDRFFPLSGSLIFGKQGTGRDNVDADKVMITNEEEIKTTNPVATESYGQVATNHQSAQAQAQTGWVQNQGILPGMVWQDRDVYLQGPIWAKIPHTDGNFHPSPLMGGFGMKHPPPQILIKNTPVPADPPTAFNKDKLNSFITQYSTGQVSVEIEWELQKENSKRWNPEIQYTSNYYKSNNVEFAVNTEGVYSEPRPIGTRYLTRNL

SEQ ID NO: 44 - protein, 742 aa, synthetic construct
MAADGYLPDWLEDNLSEGIREWWALKPGAPQPKANQQHQDNARGLVLPGYKYLGPGNGLDKGEPVNAADAAALEHDKAYDQQLKAGDNPYLKYNHADAEFQERLKEDTSFGGNLGRAVFQAKKRLLEPLGLVEEAAKTAPGKKRPVEQSPQEPDSSAGIGKSGAQPAKKRLNFGQTGDTESVPDPQPIGEPPAAPSGVGSLTMASGGGAPVADNNEGADGVGSSSGNWHCDSQWLGDRVITTSTRTWALPTYNNHLYKQISNSTSGGSSNDNAYFGYSTPWGYFDFNRFHCHFSPRDWQRLINNNWGFRPKRLNFKLFNIQVKEVTDNNGVKTIANNLTSTVQVFTDSDYQLPYVLGSAHEGCLPPFPADVFMIPQYGYLTLNDGSQAVGRSSFYCLEYFPSQMLRTGNNFQFSYEFENVPFHSSYAHSQSLDRLMNPLIDQYLYYLSKTIDGHDSPHSKAQNQQTLKFSVAGPSNMAVQGRNYIPGPSYRQQRVSTTVTQNNNSEFAWPGASSWALNGRNSLMNPGPAMASHKEGEDRFFPLSGSLIFGKQGTGRDNVDADKVMITNEEEIKTTNPVATESYGQVATNHQSAQAQAQTGWVQNQGILPGMVWQDRDVYLQGPIWAKIPHTDGNFHPSPLMGGFGMKHPPPQILIKNTPVPADPPTAFNKDKLNSFITQYSTGQVSVEIEWELQKENSKRWNPEIQYTSNYYKSNNVEFAVNTEGVYSEPRPIGTRYLTRNL

SEQ ID NO: 45 - protein, 742 aa, synthetic construct
MAADGYLPDWLEDNLSEGIREWWALKPGAPQPKANQQHQDNARGLVLPGYKYLGPGNGLDKGEPVNAADAAALEHDKAYDQQLKAGDNPYLKYNHADAEFQERLKEDTSFGGNLGRAVFQAKKRLLEPLGLVEEAAKTAPGKKRPVEQSPQEPDSSAGIGKSGAQPAKKRLNFGQTGDTESVPDPQPIGEPPAAPSGVGSLTMASGGGAPVADNNEGADGVGSSSGNWHCDSQWLGDRVITTSTRTWALPTYNNHLYKQISNSTSGGSSNDNAYFGYSTPWGYFDFNRFHCHFSPRDWQRLINNNWGFRPKRLNFKLFNIQVKEVTDNNGVKTIANNLTSTVQVFTDSDYQLPYVLGSAHEGCLPPFPADVFMIPQYGYLTLNDGSQAVGRSSFYCLEYFPSQMLRTGNNFQFSYEFENVPFHSSYAHSQSLDRLMNPLIDQYLYYLSKTNNGHDSPHSKAQNQQTLKFSVAGPSNMAVQGRNYIPGPSYRQQRVSTTVTQNNNSEFAWPGASSWALNGRNSLMNPGPAMASHKEGEDRFFPLSGSLIFGKQGTGRDNVDADKVMITNEEEIKTTNPVATESYGQVATNHQSAQAQAQTGWVQNQGILPGMVWQDRDVYLQGPIWAKIPHTDGNFHPSPLMGGFGMKHPPPQILIKNTPVPADPPTAFNKDKLNSFITQYSTGQVSVEIEWELQKENSKRWNPEIQYTSNYYKSNNVEFAVNTEGVYSEPRPIGTRYLTRNL

SEQ ID NO: 46 - protein, 742 aa, synthetic construct
MAADGYLPDWLEDNLSEGIREWWALKPGAPQPKANQQHQDNARGLVLPGYKYLGPGNGLDKGEPVNAADAAALEHDKAYDQQLKAGDNPYLKYNHADAEFQERLKEDTSFGGNLGRAVFQAKKRLLEPLGLVEEAAKTAPGKKRPVEQSPQEPDSSAGIGKSGAQPAKKRLNFGQTGDTESVPDPQPIGEPPAAPSGVGSLTMASGGGAPVADNNEGADGVGSSSGNWHCDSQWLGDRVITTSTRTWALPTYNNHLYKQISNSTSGGSSNDNAYFGYSTPWGYFDFNRFHCHFSPRDWQRLINNNWGFRPKRLNFKLFNIQVKEVTDNNGVKTIANNLTSTVQVFTDSDYQLPYVLGSAHEGCLPPFPADVFMIPQYGYLTLNDGSQAVGRSSFYCLEYFPSQMLRTGNNFQFSYEFENVPFHSSYAHSQSLDRLMNPLIDQYLYYLSKTQRKSGSPHSKAQNQQTLKFSVAGPSNMAVQGRNYIPGPSYRQQRVSTTVTQNNNSEFAWPGASSWALNGRNSLMNPGPAMASHKEGEDRFFPLSGSLIFGKQGTGRDNVDADKVMITNEEEIKTTNPVATESYGQVATNHQSAQAQAQTGWVQNQGILPGMVWQDRDVYLQGPIWAKIPHTDGNFHPSPLMGGFGMKHPPPQILIKNTPVPADPPTAFNKDKLNSFITQYSTGQVSVEIEWELQKENSKRWNPEIQYTSNYYKSNNVEFAVNTEGVYSEPRPIGTRYLTRNL

SEQ ID NO: 47 - protein, 742 aa, synthetic construct
MAADGYLPDWLEDNLSEGIREWWALKPGAPQPKANQQHQDNARGLVLPGYKYLGPGNGLDKGEPVNAADAAALEHDKAYDQQLKAGDNPYLKYNHADAEFQERLKEDTSFGGNLGRAVFQAKKRLLEPLGLVEEAAKTAPGKKRPVEQSPQEPDSSAGIGKSGAQPAKKRLNFGQTGDTESVPDPQPIGEPPAAPSGVGSLTMASGGGAPVADNNEGADGVGSSSGNWHCDSQWLGDRVITTSTRTWALPTYNNHLYKQISNSTSGGSSNDNAYFGYSTPWGYFDFNRFHCHFSPRDWQRLINNNWGFRPKRLNFKLFNIQVKEVTDNNGVKTIANNLTSTVQVFTDSDYQLPYVLGSAHEGCLPPFPADVFMIPQYGYLTLNDGSQAVGRSSFYCLEYFPSQMLRTGNNFQFSYEFENVPFHSSYAHSQSLDRLMNPLIDQYLYYLSKTINGSGSPHSKAQARKTLKFSVAGPSNMAVQGRNYIPGPSYRQQRVSTTVTQNNNSEFAWPGASSWALNGRNSLMNPGPAMASHKEGEDRFFPLSGSLIFGKQGTGRDNVDADKVMITNEEEIKTTNPVATESYGQVATNHQSAQAQAQTGWVQNQGILPGMVWQDRDVYLQGPIWAKIPHTDGNFHPSPLMGGFGMKHPPPQILIKNTPVPADPPTAFNKDKLNSFITQYSTGQVSVEIEWELQKENSKRWNPEIQYTSNYYKSNNVEFAVNTEGVYSEPRPIGTRYLTRNL

SEQ ID NO: 48 - protein, 742 aa, synthetic construct
MAADGYLPDWLEDNLSEGIREWWALKPGAPQPKANQQHQDNARGLVLPGYKYLGPGNGLDKGEPVNAADAAALEHDKAYDQQLKAGDNPYLKYNHADAEFQERLKEDTSFGGNLGRAVFQAKKRLLEPLGLVEEAAKTAPGKKRPVEQSPQEPDSSAGIGKSGAQPAKKRLNFGQTGDTESVPDPQPIGEPPAAPSGVGSLTMASGGGAPVADNNEGADGVGSSSGNWHCDSQWLGDRVITTSTRTWALPTYNNHLYKQISNSTSGGSSNDNAYFGYSTPWGYFDFNRFHCHFSPRDWQRLINNNWGFRPKRLNFKLFNIQVKEVTDNNGVKTIANNLTSTVQVFTDSDYQLPYVLGSAHEGCLPPFPADVFMIPQYGYLTLNDGSQAVGRSSFYCLEYFPSQMLRTGNNFQFSYEFENVPFHSSYAHSQSLDRLMNPLIDQYLYYLSKYIVGSGSPHSKAQNQQTLKFSVAGPSNMAVQGRNYIPGPSYRQQRVSTTVTQNNNSEFAWPGASSWALNGRNSLMNPGPAMASHKEGEDRFFPLSGSLIFGKQGTGRDNVDADKVMITNEEEIKTTNPVATESYGQVATNHQSAQAQAQTGWVQNQGILPGMVWQDRDVYLQGPIWAKIPHTDGNFHPSPLMGGFGMKHPPPQILIKNTPVPADPPTAFNKDKLNSFITQYSTGQVSVEIEWELQKENSKRWNPEIQYTSNYYKSNNVEFAVNTEGVYSEPRPIGTRYLTRNL

SEQ ID NO: 49 - protein, 742 aa, synthetic construct
MAADGYLPDWLEDNLSEGIREWWALKPGAPQPKANQQHQDNARGLVLPGYKYLGPGNGLDKGEPVNAADAAALEHDKAYDQQLKAGDNPYLKYNHADAEFQERLKEDTSFGGNLGRAVFQAKKRLLEPLGLVEEAAKTAPGKKRPVEQSPQEPDSSAGIGKSGAQPAKKRLNFGQTGDTESVPDPQPIGEPPAAPSGVGSLTMASGGGAPVADNNEGADGVGSSSGNWHCDSQWLGDRVITTSTRTWALPTYNNHLYKQISNSTSGGSSNDNAYFGYSTPWGYFDFNRFHCHFSPRDWQRLINNNWGFRPKRLNFKLFNIQVKEVTDNNGVKTIANNLTSTVQVFTDSDYQLPYVLGSAHEGCLPPFPADVFMIPQYGYLTLNDGSQAVGRSSFYCLEYFPSQMLRTGNNFQFSYEFENVPFHSSYAHSQSLDRLMNPLIDQYLYYLSKTISKRGSPHSKAQNQQTLKFSVAGPSNMAVQGRNYIPGPSYRQQRVSTTVTQNNNSEFAWPGASSWALNGRNSLMNPGPAMASHKEGEDRFFPLSGSLIFGKQGTGRDNVDADKVMITNEEEIKTTNPVATESYGQVATNHQSAQAQAQTGWVQNQGILPGMVWQDRDVYLQGPIWAKIPHTDGNFHPSPLMGGFGMKHPPPQILIKNTPVPADPPTAFNKDKLNSFITQYSTGQVSVEIEWELQKENSKRWNPEIQYTSNYYKSNNVEFAVNTEGVYSEPRPIGTRYLTRNL

SEQ ID NO: 50 - protein, 742 aa, synthetic construct
MAADGYLPDWLEDNLSEGIREWWALKPGAPQPKANQQHQDNARGLVLPGYKYLGPGNGLDKGEPVNAADAAALEHDKAYDQQLKAGDNPYLKYNHADAEFQERLKEDTSFGGNLGRAVFQAKKRLLEPLGLVEEAAKTAPGKKRPVEQSPQEPDSSAGIGKSGAQPAKKRLNFGQTGDTESVPDPQPIGEPPAAPSGVGSLTMASGGGAPVADNNEGADGVGSSSGNWHCDSQWLGDRVITTSTRTWALPTYNNHLYKQISNSTSGGSSNDNAYFGYSTPWGYFDFNRFHCHFSPRDWQRLINNNWGFRPKRLNFKLFNIQVKEVTDNNGVKTIANNLTSTVQVFTDSDYQLPYVLGSAHEGCLPPFPADVFMIPQYGYLTLNDGSQAVGRSSFYCLEYFPSQMLRTGNNFQFSYEFENVPFHSSYAHSQSLDRLMNPLIDQYLYYLSKGLGGSGSPHSKAQNQQTLKFSVAGPSNMAVQGRNYIPGPSYRQQRVSTTVTQNNNSEFAWPGASSWALNGRNSLMNPGPAMASHKEGEDRFFPLSGSLIFGKQGTGRDNVDADKVMITNEEEIKTTNPVATESYGQVATNHQSAQAQAQTGWVQNQGILPGMVWQDRDVYLQGPIWAKIPHTDGNFHPSPLMGGFGMKHPPPQILIKNTPVPADPPTAFNKDKLNSFITQYSTGQVSVEIEWELQKENSKRWNPEIQYTSNYYKSNNVEFAVNTEGVYSEPRPIGTRYLTRNL

SEQ ID NO: 51 - protein, 742 aa, synthetic construct
MAADGYLPDWLEDNLSEGIREWWALKPGAPQPKANQQHQDNARGLVLPGYKYLGPGNGLDKGEPVNAADAAALEHDKAYDQQLKAGDNPYLKYNHADAEFQERLKEDTSFGGNLGRAVFQAKKRLLEPLGLVEEAAKTAPGKKRPVEQSPQEPDSSAGIGKSGAQPAKKRLNFGQTGDTESVPDPQPIGEPPAAPSGVGSLTMASGGGAPVADNNEGADGVGSSSGNWHCDSQWLGDRVITTSTRTWALPTYNNHLYKQISNSTSGGSSNDNAYFGYSTPWGYFDFNRFHCHFSPRDWQRLINNNWGFRPKRLNFKLFNIQVKEVTDNNGVKTIANNLTSTVQVFTDSDYQLPYVLGSAHEGCLPPFPADVFMIPQYGYLTLNDGSQAVGRSSFYCLEYFPSQMLRTGNNFQFSYEFENVPFHSSYAHSQSLDRLMNPLIDQYLYYLSKTINGHDSPHSKAQNLQTLKFSVAGPSNMAVQGRNYIPGPSYRQQRVSTTVTQNNNSEFAWPGASSWALNGRNSLMNPGPAMASHKEGEDRFFPLSGSLIFGKQGTGRDNVDADKVMITNEEEIKTTNPVATESYGQVATNHQSAQAQAQTGWVQNQGILPGMVWQDRDVYLQGPIWAKIPHTDGNFHPSPLMGGFGMKHPPPQILIKNTPVPADPPTAFNKDKLNSFITQYSTGQVSVEIEWELQKENSKRWNPEIQYTSNYYKSNNVEFAVNTEGVYSEPRPIGTRYLTRNL

SEQ ID NO: 52 - protein, 742 aa, synthetic construct
MAADGYLPDWLEDNLSEGIREWWALKPGAPQPKANQQHQDNARGLVLPGYKYLGPGNGLDKGEPVNAADAAALEHDKAYDQQLKAGDNPYLKYNHADAEFQERLKEDTSFGGNLGRAVFQAKKRLLEPLGLVEEAAKTAPGKKRPVEQSPQEPDSSAGIGKSGAQPAKKRLNFGQTGDTESVPDPQPIGEPPAAPSGVGSLTMASGGGAPVADNNEGADGVGSSSGNWHCDSQWLGDRVITTSTRTWALPTYNNHLYKQISNSTSGGSSNDNAYFGYSTPWGYFDFNRFHCHFSPRDWQRLINNNWGFRPKRLNFKLFNIQVKEVTDNNGVKTIANNLTSTVQVFTDSDYQLPYVLGSAHEGCLPPFPADVFMIPQYGYLTLNDGSQAVGRSSFYCLEYFPSQMLRTGNNFQFSYEFENVPFHSSYAHSQSLDRLMNPLIDQYLYYLSKTVNGHDSPHSKAQNQQTLKFSVAGPSNMAVQGRNYIPGPSYRQQRVSTTVTQNNNSEFAWPGASSWALNGRNSLMNPGPAMASHKEGEDRFFPLSGSLIFGKQGTGRDNVDADKVMITNEEEIKTTNPVATESYGQVATNHQSAQAQAQTGWVQNQGILPGMVWQDRDVYLQGPIWAKIPHTDGNFHPSPLMGGFGMKHPPPQILIKNTPVPADPPTAFNKDKLNSFITQYSTGQVSVEIEWELQKENSKRWNPEIQYTSNYYKSNNVEFAVNTEGVYSEPRPIGTRYLTRNL

SEQ ID NO: 53 - protein, 742 aa, synthetic construct
MAADGYLPDWLEDNLSEGIREWWALKPGAPQPKANQQHQDNARGLVLPGYKYLGPGNGLDKGEPVNAADAAALEHDKAYDQQLKAGDNPYLKYNHADAEFQERLKEDTSFGGNLGRAVFQAKKRLLEPLGLVEEAAKTAPGKKRPVEQSPQEPDSSAGIGKSGAQPAKKRLNFGQTGDTESVPDPQPIGEPPAAPSGVGSLTMASGGGAPVADNNEGADGVGSSSGNWHCDSQWLGDRVITTSTRTWALPTYNNHLYKQISNSTSGGSSNDNAYFGYSTPWGYFDFNRFHCHFSPRDWQRLINNNWGFRPKRLNFKLFNIQVKEVTDNNGVKTIANNLTSTVQVFTDSDYQLPYVLGSAHEGCLPPFPADVFMIPQYGYLTLNDGSQAVGRSSFYCLEYFPSQMLRTGNNFQFSYEFENVPFHSSYAHSQSLDRLMNPLIDQYLYYLSKTINGHDSPHSKALNQQTLKFSVAGPSNMAVQGRNYIPGPSYRQQRVSTTVTQNNNSEFAWPGASSWALNGRNSLMNPGPAMASHKEGEDRFFPLSGSLIFGKQGTGRDNVDADKVMITNEEEIKTTNPVATESYGQVATNHQSAQAQAQTGWVQNQGILPGMVWQDRDVYLQGPIWAKIPHTDGNFHPSPLMGGFGMKHPPPQILIKNTPVPADPPTAFNKDKLNSFITQYSTGQVSVEIEWELQKENSKRWNPEIQYTSNYYKSNNVEFAVNTEGVYSEPRPIGTRYLTRNL

SEQ ID NO: 54 - protein, 742 aa, synthetic construct
MAADGYLPDWLEDNLSEGIREWWALKPGAPQPKANQQHQDNARGLVLPGYKYLGPGNGLDKGEPVNAADAAALEHDKAYDQQLKAGDNPYLKYNHADAEFQERLKEDTSFGGNLGRAVFQAKKRLLEPLGLVEEAAKTAPGKKRPVEQSPQEPDSSAGIGKSGAQPAKKRLNFGQTGDTESVPDPQPIGEPPAAPSGVGSLTMASGGGAPVADNNEGADGVGSSSGNWHCDSQWLGDRVITTSTRTWALPTYNNHLYKQISNSTSGGSSNDNAYFGYSTPWGYFDFNRFHCHFSPRDWQRLINNNWGFRPKRLNFKLFNIQVKEVTDNNGVKTIANNLTSTVQVFTDSDYQLPYVLGSAHEGCLPPFPADVFMIPQYGYLTLNDGSQAVGRSSFYCLEYFPSQMLRTGNNFQFSYEFENVPFHSSYAHSQSLDRLMNPLIDQYLYYLSKTINGHDSPHSKAQNQQSLKFSVAGPSNMAVQGRNYIPGPSYRQQRVSTTVTQNNNSEFAWPGASSWALNGRNSLMNPGPAMASHKEGEDRFFPLSGSLIFGKQGTGRDNVDADKVMITNEEEIKTTNPVATESYGQVATNHQSAQAQAQTGWVQNQGILPGMVWQDRDVYLQGPIWAKIPHTDGNFHPSPLMGGFGMKHPPPQILIKNTPVPADPPTAFNKDKLNSFITQYSTGQVSVEIEWELQKENSKRWNPEIQYTSNYYKSNNVEFAVNTEGVYSEPRPIGTRYLTRNL

SEQ ID NO: 55 - protein, 742 aa, synthetic construct
MAADGYLPDWLEDNLSEGIREWWALKPGAPQPKANQQHQDNARGLVLPGYKYLGPGNGLDKGEPVNAADAAALEHDKAYDQQLKAGDNPYLKYNHADAEFQERLKEDTSFGGNLGRAVFQAKKRLLEPLGLVEEAAKTAPGKKRPVEQSPQEPDSSAGIGKSGAQPAKKRLNFGQTGDTESVPDPQPIGEPPAAPSGVGSLTMASGGGAPVADNNEGADGVGSSSGNWHCDSQWLGDRVITTSTRTWALPTYNNHLYKQISNSTSGGSSNDNAYFGYSTPWGYFDFNRFHCHFSPRDWQRLINNNWGFRPKRLNFKLFNIQVKEVTDNNGVKTIANNLTSTVQVFTDSDYQLPYVLGSAHEGCLPPFPADVFMIPQYGYLTLNDGSQAVGRSSFYCLEYFPSQMLRTGNNFQFSYEFENVPFHSSYAHSQSLDRLMNPLIDQYLYYLSKTINGHDSPHSKAQNQQILKFSVAGPSNMAVQGRNYIPGPSYRQQRVSTTVTQNNNSEFAWPGASSWALNGRNSLMNPGPAMASHKEGEDRFFPLSGSLIFGKQGTGRDNVDADKVMITNEEEIKTTNPVATESYGQVATNHQSAQAQAQTGWVQNQGILPGMVWQDRDVYLQGPIWAKIPHTDGNFHPSPLMGGFGMKHPPPQILIKNTPVPADPPTAFNKDKLNSFITQYSTGQVSVEIEWELQKENSKRWNPEIQYTSNYYKSNNVEFAVNTEGVYSEPRPIGTRYLTRNL

SEQ ID NO: 56 - protein, 742 aa, synthetic construct
MAADGYLPDWLEDNLSEGIREWWALKPGAPQPKANQQHQDNARGLVLPGYKYLGPGNGLDKGEPVNAADAAALEHDKAYDQQLKAGDNPYLKYNHADAEFQERLKEDTSFGGNLGRAVFQAKKRLLEPLGLVEEAAKTAPGKKRPVEQSPQEPDSSAGIGKSGAQPAKKRLNFGQTGDTESVPDPQPIGEPPAAPSGVGSLTMASGGGAPVADNNEGADGVGSSSGNWHCDSQWLGDRVITTSTRTWALPTYNNHLYKQISNSTSGGSSNDNAYFGYSTPWGYFDFNRFHCHFSPRDWQRLINNNWGFRPKRLNFKLFNIQVKEVTDNNGVKTIANNLTSTVQVFTDSDYQLPYVLGSAHEGCLPPFPADVFMIPQYGYLTLNDGSQAVGRSSFYCLEYFPSQMLRTGNNFQFSYEFENVPFHSSYAHSQSLDRLMNPLIDQYLYYLSKTINGSGSPHFTRQNQQTLKFSVAGPSNMAVQGRNYIPGPSYRQQRVSTTVTQNNNSEFAWPGASSWALNGRNSLMNPGPAMASHKEGEDRFFPLSGSLIFGKQGTGRDNVDADKVMITNEEEIKTTNPVATESYGQVATNHQSAQAQAQTGWVQNQGILPGMVWQDRDVYLQGPIWAKIPHTDGNFHPSPLMGGFGMKHPPPQILIKNTPVPADPPTAFNKDKLNSFITQYSTGQVSVEIEWELQKENSKRWNPEIQYTSNYYKSNNVEFAVNTEGVYSEPRPIGTRYLTRNL

SEQ ID NO: 57 - protein, 742 aa, synthetic construct
MAADGYLPDWLEDNLSEGIREWWALKPGAPQPKANQQHQDNARGLVLPGYKYLGPGNGLDKGEPVNAADAAALEHDKAYDQQLKAGDNPYLKYNHADAEFQERLKEDTSFGGNLGRAVFQAKKRLLEPLGLVEEAAKTAPGKKRPVEQSPQEPDSSAGIGKSGAQPAKKRLNFGQTGDTESVPDPQPIGEPPAAPSGVGSLTMASGGGAPVADNNEGADGVGSSSGNWHCDSQWLGDRVITTSTRTWALPTYNNHLYKQISNSTSGGSSNDNAYFGYSTPWGYFDFNRFHCHFSPRDWQRLINNNWGFRPKRLNFKLFNIQVKEVTDNNGVKTIANNLTSTVQVFTDSDYQLPYVLGSAHEGCLPPFPADVFMIPQYGYLTLNDGSQAVGRSSFYCLEYFPSQMLRTGNNFQFSYEFENVPFHSSYAHSQSLDRLMNPLIDQYLYYLSKTSNGHDSPHSKAQNQQTLKFSVAGPSNMAVQGRNYIPGPSYRQQRVSTTVTQNNNSEFAWPGASSWALNGRNSLMNPGPAMASHKEGEDRFFPLSGSLIFGKQGTGRDNVDADKVMITNEEEIKTTNPVATESYGQVATNHQSAQAQAQTGWVQNQGILPGMVWQDRDVYLQGPIWAKIPHTDGNFHPSPLMGGFGMKHPPPQILIKNTPVPADPPTAFNKDKLNSFITQYSTGQVSVEIEWELQKENSKRWNPEIQYTSNYYKSNNVEFAVNTEGVYSEPRPIGTRYLTRNL

SEQ ID NO: 58 - protein, 742 aa, synthetic construct
MAADGYLPDWLEDNLSEGIREWWALKPGAPQPKANQQHQDNARGLVLPGYKYLGPGNGLDKGEPVNAADAAALEHDKAYDQQLKAGDNPYLKYNHADAEFQERLKEDTSFGGNLGRAVFQAKKRLLEPLGLVEEAAKTAPGKKRPVEQSPQEPDSSAGIGKSGAQPAKKRLNFGQTGDTESVPDPQPIGEPPAAPSGVGSLTMASGGGAPVADNNEGADGVGSSSGNWHCDSQWLGDRVITTSTRTWALPTYNNHLYKQISNSTSGGSSNDNAYFGYSTPWGYFDFNRFHCHFSPRDWQRLINNNWGFRPKRLNFKLFNIQVKEVTDNNGVKTIANNLTSTVQVFTDSDYQLPYVLGSAHEGCLPPFPADVFMIPQYGYLTLNDGSQAVGRSSFYCLEYFPSQMLRTGNNFQFSYEFENVPFHSSYAHSQSLDRLMNPLIDQYLYYLSKTINGSGSPHSLPWNQQTLKFSVAGPSNMAVQGRNYIPGPSYRQQRVSTTVTQNNNSEFAWPGASSWALNGRNSLMNPGPAMASHKEGEDRFFPLSGSLIFGKQGTGRDNVDADKVMITNEEEIKTTNPVATESYGQVATNHQSAQAQAQTGWVQNQGILPGMVWQDRDVYLQGPIWAKIPHTDGNFHPSPLMGGFGMKHPPPQILIKNTPVPADPPTAFNKDKLNSFITQYSTGQVSVEIEWELQKENSKRWNPEIQYTSNYYKSNNVEFAVNTEGVYSEPRPIGTRYLTRNL

SEQ ID NO: 59 - protein, 742 aa, synthetic construct
MAADGYLPDWLEDNLSEGIREWWALKPGAPQPKANQQHQDNARGLVLPGYKYLGPGNGLDKGEPVNAADAAALEHDKAYDQQLKAGDNPYLKYNHADAEFQERLKEDTSFGGNLGRAVFQAKKRLLEPLGLVEEAAKTAPGKKRPVEQSPQEPDSSAGIGKSGAQPAKKRLNFGQTGDTESVPDPQPIGEPPAAPSGVGSLTMASGGGAPVADNNEGADGVGSSSGNWHCDSQWLGDRVITTSTRTWALPTYNNHLYKQISNSTSGGSSNDNAYFGYSTPWGYFDFNRFHCHFSPRDWQRLINNNWGFRPKRLNFKLFNIQVKEVTDNNGVKTIANNLTSTVQVFTDSDYQLPYVLGSAHEGCLPPFPADVFMIPQYGYLTLNDGSQAVGRSSFYCLEYFPSQMLRTGNNFQFSYEFENVPFHSSYAHSQSLDRLMNPLIDQYLYYLSKTINGHDSPHSKAQNHQTLKFSVAGPSNMAVQGRNYIPGPSYRQQRVSTTVTQNNNSEFAWPGASSWALNGRNSLMNPGPAMASHKEGEDRFFPLSGSLIFGKQGTGRDNVDADKVMITNEEEIKTTNPVATESYGQVATNHQSAQAQAQTGWVQNQGILPGMVWQDRDVYLQGPIWAKIPHTDGNFHPSPLMGGFGMKHPPPQILIKNTPVPADPPTAFNKDKLNSFITQYSTGQVSVEIEWELQKENSKRWNPEIQYTSNYYKSNNVEFAVNTEGVYSEPRPIGTRYLTRNL

SEQ ID NO: 60 - DNA, 22 bp, synthetic construct
  source 1..22: mol_type = other DNA
agtgaattctaccagtgccata

SEQ ID NO: 61 - DNA, 23 bp, synthetic construct
  source 1..23: mol_type = other DNA
acaaacaccattgtcacactcca

SEQ ID NO: 62 - DNA, 71 bp, synthetic construct
  source 1..71: mol_type = other DNA
acaaacaccattgtcacactccacacaaacaccattgtcacactccacacaaacaccattgtcacactcca

SEQ ID NO: 63 - DNA, 24 bp, synthetic construct
  source 1..24: mol_type = other DNA
agtgtgagttctaccattgccaaa

SEQ ID NO: 64 - DNA, 23 bp, synthetic construct
  source 1..23: mol_type = other DNA
agcaaaaatgtgctagtgccaaa

SEQ ID NO: 65 - DNA, 23 bp, synthetic construct
  source 1..23: mol_type = other DNA
tccataaagtaggaaacactaca

SEQ ID NO: 66 - DNA, 21 bp, synthetic construct
  source 1..21: mol_type = other DNA
gcaggtcctcactttaatgct

SEQ ID NO: 67 - protein, 18 aa, synthetic construct
KTVNGHDSPHKSLQNQQT

SEQ ID NO: 68 - protein, 18 aa, synthetic construct
KAINGHDSPHKSGQSPQT

SEQ ID NO: 69 - protein, 742 aa, synthetic construct
MAADGYLPDWLEDNLSEGIREWWALKPGAPQPKANQQHQDNARGLVLPGYKYLGPGNGLDKGEPVNAADAAALEHDKAYDQQLKAGDNPYLKYNHADAEFQERLKEDTSFGGNLGRAVFQAKKRLLEPLGLVEEAAKTAPGKKRPVEQSPQEPDSSAGIGKSGAQPAKKRLNFGQTGDTESVPDPQPIGEPPAAPSGVGSLTMASGGGAPVADNNEGADGVGSSSGNWHCDSQWLGDRVITTSTRTWALPTYNNHLYKQISNSTSGGSSNDNAYFGYSTPWGYFDFNRFHCHFSPRDWQRLINNNWGFRPKRLNFKLFNIQVKEVTDNNGVKTIANNLTSTVQVFTDSDYQLPYVLGSAHEGCLPPFPADVFMIPQYGYLTLNDGSQAVGRSSFYCLEYFPSQMLRTGNNFQFSYEFENVPFHSSYAHSQSLDRLMNPLIDQYLYYLSKTENVSGSPHSKAQNQQTLKFSVAGPSNMAVQGRNYIPGPSYRQQRVSTTVTQNNNSEFAWPGASSWALNGRNSLMNPGPAMASHKEGEDRFFPLSGSLIFGKQGTGRDNVDADKVMITNEEEIKTTNPVATESYGQVATNHQSAQAQAQTGWVQNQGILPGMVWQDRDVYLQGPIWAKIPHTDGNFHPSPLMGGFGMKHPPPQILIKNTPVPADPPTAFNKDKLNSFITQYSTGQVSVEIEWELQKENSKRWNPEIQYTSNYYKSNNVEFAVNTEGVYSEPRPIGTRYLTRNL

SEQ ID NO: 70 - protein, 742 aa, synthetic construct
MAADGYLPDWLEDNLSEGIREWWALKPGAPQPKANQQHQDNARGLVLPGYKYLGPGNGLDKGEPVNAADAAALEHDKAYDQQLKAGDNPYLKYNHADAEFQERLKEDTSFGGNLGRAVFQAKKRLLEPLGLVEEAAKTAPGKKRPVEQSPQEPDSSAGIGKSGAQPAKKRLNFGQTGDTESVPDPQPIGEPPAAPSGVGSLTMASGGGAPVADNNEGADGVGSSSGNWHCDSQWLGDRVITTSTRTWALPTYNNHLYKQISNSTSGGSSNDNAYFGYSTPWGYFDFNRFHCHFSPRDWQRLINNNWGFRPKRLNFKLFNIQVKEVTDNNGVKTIANNLTSTVQVFTDSDYQLPYVLGSAHEGCLPPFPADVFMIPQYGYLTLNDGSQAVGRSSFYCLEYFPSQMLRTGNNFQFSYEFENVPFHSSYAHSQSLDRLMNPLIDQYLYYLSKTEKVSGSPHSKAQNQQTLKFSVAGPSNMAVQGRNYIPGPSYRQQRVSTTVTQNNNSEFAWPGASSWALNGRNSLMNPGPAMASHKEGEDRFFPLSGSLIFGKQGTGRDNVDADKVMITNEEEIKTTNPVATESYGQVATNHQSAQAQAQTGWVQNQGILPGMVWQDRDVYLQGPIWAKIPHTDGNFHPSPLMGGFGMKHPPPQILIKNTPVPADPPTAFNKDKLNSFITQYSTGQVSVEIEWELQKENSKRWNPEIQYTSNYYKSNNVEFAVNTEGVYSEPRPIGTRYLTRNL

SEQ ID NO: 71 - protein, 742 aa, synthetic construct
MAADGYLPDWLEDNLSEGIREWWALKPGAPQPKANQQHQDNARGLVLPGYKYLGPGNGLDKGEPVNAADAAALEHDKAYDQQLKAGDNPYLKYNHADAEFQERLKEDTSFGGNLGRAVFQAKKRLLEPLGLVEEAAKTAPGKKRPVEQSPQEPDSSAGIGKSGAQPAKKRLNFGQTGDTESVPDPQPIGEPPAAPSGVGSLTMASGGGAPVADNNEGADGVGSSSGNWHCDSQWLGDRVITTSTRTWALPTYNNHLYKQISNSTSGGSSNDNAYFGYSTPWGYFDFNRFHCHFSPRDWQRLINNNWGFRPKRLNFKLFNIQVKEVTDNNGVKTIANNLTSTVQVFTDSDYQLPYVLGSAHEGCLPPFPADVFMIPQYGYLTLNDGSQAVGRSSFYCLEYFPSQMLRTGNNFQFSYEFENVPFHSSYAHSQSLDRLMNPLIDQYLYYLSKTINGSGSPHKSGQNKTSLKFSVAGPSNMAVQGRNYIPGPSYRQQRVSTTVTQNNNSEFAWPGASSWALNGRNSLMNPGPAMASHKEGEDRFFPLSGSLIFGKQGTGRDNVDADKVMITNEEEIKTTNPVATESYGQVATNHQSAQAQAQTGWVQNQGILPGMVWQDRDVYLQGPIWAKIPHTDGNFHPSPLMGGFGMKHPPPQILIKNTPVPADPPTAFNKDKLNSFITQYSTGQVSVEIEWELQKENSKRWNPEIQYTSNYYKSNNVEFAVNTEGVYSEPRPIGTRYLTRNL

SEQ ID NO: 72 - DNA, 2226 bp, synthetic construct
  source 1..2226: mol_type = other DNA
atggctgccgatggttatcttccagattggctcgaggacaaccttagtgaaggaattcgcgagtggtgggctttgaaacctggagcccctcaacccaaggcaaatcaacaacatcaagacaacgctcgaggtcttgtgcttccgggttacaaataccttggacccggcaacggactcgacaagggggagccggtcaacgcagcagacgcggcggccctcgagcacgacaaggcctacgaccagcagctcaaggccggagacaacccgtacctcaagtacaaccacgccgacgccgagttccaggagcggctcaaagaagatacgtcttttgggggcaacctcgggcgagcagtcttccaggccaaaaagaggcttcttgaacctcttggtctggttgaggaagcggctaagacggctcctggaaagaagaggcctgtagagcagtctcctcaggaaccggactcctccgcgggtattggcaaatcgggtgcacagcccgctaaaaagagactcaatttcggtcagactggcgacacagagtcagtcccagaccctcaaccaatcggagaacctcccgcagccccctcaggtgtgggatctcttacaatggcttcaggtggtggcgcaccagtggcagacaataacgaaggtgccgatggagtgggtagttcctcgggaaattggcattgcgattcccaatggctgggggacagagtcatcaccaccagcacccgaacctgggccctgcccacctacaacaatcacctctacaagcaaatctccaacagcacatctggaggatcttcaaatgacaacgcctacttcggctacagcaccccctgggggtattttgacttcaacagattccactgccacttctcaccacgtgactggcagcgactcatcaacaacaactggggattccggcctaagcgactcaacttcaagctcttcaacattcaggtcaaagaggttacggacaacaatggagtcaagaccatcgccaataaccttaccagcacggtccaggtcttcacggactcagactatcagctcccgtacgtgctcgggtcggctcacgagggctgcctcccgccgttcccagcggacgttttcatgattcctcagtacgggtatctgacgcttaatgatggaagccaggccgtgggtcgttcgtccttttactgcctggaatatttcccgtcgcaaatgctaagaacgggtaacaacttccagttcagctacgagtttgagaacgtacctttccatagcagctacgctcacagccaaagcctggaccgactaatgaatccactcatcgatcagtatctgtattacttgagtaagacggagcgtgtgtctggttctccgcattctaaggcgcagaatcagcagacgttgaagttttcggtagctggtcctagcaacatggctgtccagggaagaaactacatacctggacccagctaccgacaacaacgtgtctcaaccactgtgactcaaaacaacaacagcgaatttgcttggcctggagcttcttcttgggctctcaatggacgtaatagcttgatgaatcctggacctgctatggccagccacaaagaaggagaggaccgtttctttcctttgtctggatctttaatttttggcaaacaaggaactggaagagacaacgtggatgcggacaaagtcatgataaccaacgaagaagaaattaaaactactaacccggtagcaacggagtcctatggacaagtggccacaaaccaccagagtgcccaagcacaggcgcagaccggctgggttcaaaaccaaggaatacttccgggtatggtttggcaggacagagatgtgtacctgcaaggacccatttgggccaaaattcctcacacggacggcaactttcacccttctccgctgatgggagggtttggaatgaagcacccgcctcctcagatcctcatcaaaaacacacctgtacctgcggatcctccaacggccttcaacaaggacaagctgaactctttcatcacccagtattctactggccaagtcagcgtggagatcgagtgggagctgcagaaggaaaacagcaagcgctggaacccggagatccagtacacttccaactattacaagtctaataatgttgaatttgctgttaatactgaaggtgtatatagtgaaccccgccccattggcacgcggtatttaacgaggaactta

SEQ ID NO: 73 - DNA, 2226 bp, synthetic construct
  source 1..2226: mol_type = other DNA
atggctgccgatggttatcttccagattggctcgaggacaaccttagtgaaggaattcgcgagtggtgggctttgaaacctggagcccctcaacccaaggcaaatcaacaacatcaagacaacgctcgaggtcttgtgcttccgggttacaaataccttggacccggcaacggactcgacaagggggagccggtcaacgcagcagacgcggcggccctcgagcacgacaaggcctacgaccagcagctcaaggccggagacaacccgtacctcaagtacaaccacgccgacgccgagttccaggagcggctcaaagaagatacgtcttttgggggcaacctcgggcgagcagtcttccaggccaaaaagaggcttcttgaacctcttggtctggttgaggaagcggctaagacggctcctggaaagaagaggcctgtagagcagtctcctcaggaaccggactcctccgcgggtattggcaaatcgggtgcacagcccgctaaaaagagactcaatttcggtcagactggcgacacagagtcagtcccagaccctcaaccaatcggagaacctcccgcagccccctcaggtgtgggatctcttacaatggcttcaggtggtggcgcaccagtggcagacaataacgaaggtgccgatggagtgggtagttcctcgggaaattggcattgcgattcccaatggctgggggacagagtcatcaccaccagcacccgaacctgggccctgcccacctacaacaatcacctctacaagcaaatctccaacagcacatctggaggatcttcaaatgacaacgcctacttcggctacagcaccccctgggggtattttgacttcaacagattccactgccacttctcaccacgtgactggcagcgactcatcaacaacaactggggattccggcctaagcgactcaacttcaagctcttcaacattcaggtcaaagaggttacggacaacaatggagtcaagaccatcgccaataaccttaccagcacggtccaggtcttcacggactcagactatcagctcccgtacgtgctcgggtcggctcacgagggctgcctcccgccgttcccagcggacgttttcatgattcctcagtacgggtatctgacgcttaatgatggaagccaggccgtgggtcgttcgtccttttactgcctggaatatttcccgtcgcaaatgctaagaacgggtaacaacttccagttcagctacgagtttgagaacgtacctttccatagcagctacgctcacagccaaagcctggaccgactaatgaatccactcatcgatcagtatctgtattacttgagtaaggcggagattggtcatgattctccgcataagtctggtcagaatcagcagacgttgaagttttcggtagctggtcctagcaacatggctgtccagggaagaaactacatacctggacccagctaccgacaacaacgtgtctcaaccactgtgactcaaaacaacaacagcgaatttgcttggcctggagcttcttcttgggctctcaatggacgtaatagcttgatgaatcctggacctgctatggccagccacaaagaaggagaggaccgtttctttcctttgtctggatctttaatttttggcaaacaaggaactggaagagacaacgtggatgcggacaaagtcatgataaccaacgaagaagaaattaaaactactaacccggtagcaacggagtcctatggacaagtggccacaaaccaccagagtgcccaagcacaggcgcagaccggctgggttcaaaaccaaggaatacttccgggtatggtttggcaggacagagatgtgtacctgcaaggacccatttgggccaaaattcctcacacggacggcaactttcacccttctccgctgatgggagggtttggaatgaagcacccgcctcctcagatcctcatcaaaaacacacctgtacctgcggatcctccaacggccttcaacaaggacaagctgaactctttaatcacccagtattctactggccaagtcagcgtggagatcgagtgggagctgcagaaggaaaacagcaagcgctggaacccggagatccagtacacttccaactattacaagtctaataatgttgaatttgctgttaatactgaaggtgtatatagtgaaccccgccccattggcacgcggtatttaacgaggaactta

SEQ ID NO: 74 - DNA, 2226 bp, synthetic construct
  source 1..2226: mol_type = other DNA
atggctgccgatggttatcttccagattggctcgaggacaaccttagtgaaggaattcgcgagtggtgggctttgaaacctggagcccctcaacccaaggcaaatcaacaacatcaagacaacgctcgaggtcttgtgcttccgggttacaaataccttggacccggcaacggactcgacaagggggagccggtcaacgcagcagacgcggcggccctcgagcacgacaaggcctacgaccagcagctcaaggccggagacaacccgtacctcaagtacaaccacgccgacgccgagttccaggagcggctcaaagaagatacgtcttttgggggcaacctcgggcgagcagtcttccaggccaaaaagaggcttcttgaacctcttggtctggttgaggaagcggctaagacggctcctggaaagaagaggcctgtagagcagtctcctcaggaaccggactcctccgcgggtattggcaaatcgggtgcacagcccgctaaaaagagactcaatttcggtcagactggcgacacagagtcagtcccagaccctcaaccaatcggagaacctcccgcagccccctcaggtgtgggatctcttacaatggcttcaggtggtggcgcaccagtggcagacaataacgaaggtgccgatggagtgggtagttcctcgggaaattggcattgcgattcccaatggctgggggacagagtcatcaccaccagcacccgaacctgggccctgcccacctacaacaatcacctctacaagcaaatctccaacagcacatctggaggatcttcaaatgacaacgcctacttcggctacagcaccccctgggggtattttgacttcaacagattccactgccacttctcaccacgtgactggcagcgactcatcaacaacaactggggattccggcctaagcgactcaacttcaagctcttcaacattcaggtcaaagaggttacggacaacaatggagtcaagaccatcgccaataaccttaccagcacggtccaggtcttcacggactcagactatcagctcccgtacgtgctcgggtcggctcacgagggctgcctcccgccgttcccagcggacgttttcatgattcctcagtacgggtatctgacgcttaatgatggaagccaggccgtgggtcgttcgtccttttactgcctggaatatttcccgtcgcaaatgctaagaacgggtaacaacttccagttcagctacgagtttgagaacgtacctttccatagcagctacgctcacagccaaagcctggaccgactaatgaatccactcatcgatcagtatctgtattacttgagtaagacgattattggttctggttctccgcattctaaggcgcagaatcgtcatacgttgaagttttcggtagctggtcctagcaacatggctgtccagggaagaaactacatacctggacccagctaccgacaacaacgtgtctcaaccactgtgactcaaaacaacaacagcgaatttgcttggcctggagcttcttcttgggctctcaatggacgtaatagcttgatgaatcctggacctgctatggccagccacaaagaaggagaggaccgtttctttcctttgtctggatctttaatttttggcaaacaaggaactggaagagacaacgtggatgcggacaaagtcatgataaccaacgaagaagaaattaaaactactaacccggtagcaacggagtcctatggacaagtggccacaaaccaccagagtgcccaagcacaggcgcagaccggctgggttcaaaaccaaggaatacttccgggtatggtttggcaggacagagatgtgtacctgcaaggacccatttgggccaaaattcctcacacggacggcaactttcacccttctccgctgatgggagggtttggaatgaagcacccgcctcctcagatcctcatcaaaaacacacctgtacctgcggatcctccaacggccttcaacaaggacaagctgaactctttcatcacccagtattctactggccaagtcagcgtggagatcgagtgggagctgcagaaggaaaacagcaagcgctggaacccggagatccagtacacttccaactattacaagtctaataatgttgaatttgctgttaatactgaaggtgtatatagtgaaccccgccccattggcacgcggtatttaacgaggaactta

SEQ ID NO: 75 - DNA, 2226 bp, synthetic construct
  source 1..2226: mol_type = other DNA
atggctgccgatggttatcttccagattggctcgaggacaaccttagtgaaggaattcgcgagtggtgggctttgaaacctggagcccctcaacccaaggcaaatcaacaacatcaagacaacgctcgaggtcttgtgcttccgggttacaaataccttggacccggcaacggactcgacaagggggagccggtcaacgcagcagacgcggcggccctcgagcacgacaaggcctacgaccagcagctcaaggccggagacaacccgtacctcaagtacaaccacgccgacgccgagttccaggagcggctcaaagaagatacgtcttttgggggcaacctcgggcgagcagtcttccaggccaaaaagaggcttcttgaacctcttggtctggttgaggaagcggctaagacggctcctggaaagaagaggcctgtagagcagtctcctcaggaaccggactcctccgcgggtattggcaaatcgggtgcacagcccgctaaaaagagactcaatttcggtcagactggcgacacagagtcagtcccagaccctcaaccaatcggagaacctcccgcagccccctcaggtgtgggatctcttacaatggcttcaggtggtggcgcaccagtggcagacaataacgaaggtgccgatggagtgggtagttcctcgggaaattggcattgcgattcccaatggctgggggacagagtcatcaccaccagcacccgaacctgggccctgcccacctacaacaatcacctctacaagcaaatctccaacagcacatctggaggatcttcaaatgacaacgcctacttcggctacagcaccccctgggggtattttgacttcaacagattccactgccacttctcaccacgtgactggcagcgactcatcaacaacaactggggattccggcctaagcgactcaacttcaagctcttcaacattcaggtcaaagaggttacggacaacaatggagtcaagaccatcgccaataaccttaccagcacggtccaggtcttcacggactcagactatcagctcccgtacgtgctcgggtcggctcacgagggctgcctcccgccgttcccagcggacgttttcatgattcctcagtacgggtatctgacgcttaatgatggaagccaggccgtgggtcgttcgtccttttactgcctggaatatttcccgtcgcaaatgctaagaacgggtaacaacttccagttcagctacgagtttgagaacgtacctttccatagcagctacgctcacagccaaagcctggaccgactaatgaatccactcatcgatcagtatctgtattacttgagtaagacggagaagatgtctggttctccgcattctaaggcgcagaatcagcagacgttgaagttttcggtagctggtcctagcaacatggctgtccagggaagaaactacatacctggacccagctaccgacaacaacgtgtctcaaccactgtgactcaaaacaacaacagcgaatttgcttggcctggagcttcttcttgggctctcaatggacgtaatagcttgatgaatcctggacctgctatggccagccacaaagaaggagaggaccgtttctttcctttgtctggatctttaatttttggcaaacaaggaactggaagagacaacgtggatgcggacaaagtcatgataaccaacgaagaagaaattaaaactactaacccggtagcaacggagtcctatggacaagtggccacaaaccaccagagtgcccaagcacaggcgcagaccggctgggttcaaaaccaaggaatacttccgggtatggtttggcaggacagagatgtgtacctgcaaggacccatttgggccaaaattcctcacacggacggcaactttcacccttctccgctgatgggagggtttggaatgaagcacccgcctcctcagatcctcatcaaaaacacacctgtacctgcggatcctccaacggccttcaacaaggacaagctgaactctttcatcacccagtattctactggccaagtcagcgtggagatcgagtgggagctgcagaaggaaaacagcaagcgctggaacccggagatccagtacacttccaactattacaagtctaataatgttgaatttgctgttaatactgaaggtgtatatagtgaaccccgccccattggcacgcggtatttaacgaggaactta

SEQ ID NO: 76 - DNA, 2226 bp, synthetic construct
  source 1..2226: mol_type = other DNA
atggctgccgatggttatcttccagattggctcgaggacaaccttagtgaaggaattcgcgagtggtgggctttgaaacctggagcccctcaacccaaggcaaatcaacaacatcaagacaacgctcgaggtcttgtgcttccgggttacaaataccttggacccggcaacggactcgacaagggggagccggtcaacgcagcagacgcggcggccctcgagcacgacaaggcctacgaccagcagctcaaggccggagacaacccgtacctcaagtacaaccacgccgacgccgagttccaggagcggctcaaagaagatacgtcttttgggggcaacctcgggcgagcagtcttccaggccaaaaagaggcttcttgaacctcttggtctggttgaggaagcggctaagacggctcctggaaagaagaggcctgtagagcagtctcctcaggaaccggactcctccgcgggtattggcaaatcgggtgcacagcccgctaaaaagagactcaatttcggtcagactggcgacacagagtcagtcccagaccctcaaccaatcggagaacctcccgcagccccctcaggtgtgggatctcttacaatggcttcaggtggtggcgcaccagtggcagacaataacgaaggtgccgatggagtgggtagttcctcgggaaattggcattgcgattcccaatggctgggggacagagtcatcaccaccagcacccgaacctgggccctgcccacctacaacaatcacctctacaagcaaatctccaacagcacatctggaggatcttcaaatgacaacgcctacttcggctacagcaccccctgggggtattttgacttcaacagattccactgccacttctcaccacgtgactggcagcgactcatcaacaacaactggggattccggcctaagcgactcaacttcaagctcttcaacattcaggtcaaagaggttacggacaacaatggagtcaagaccatcgccaataaccttaccagcacggtccaggtcttcacggactcagactatcagctcccgtacgtgctcgggtcggctcacgagggctgcctcccgccgttcccagcggacgttttcatgattcctcagtacgggtatctgacgcttaatgatggaagccaggccgtgggtcgttcgtccttttactgcctggaatatttcccgtcgcaaatgctaagaacgggtaacaacttccagttcagctacgagtttgagaacgtacctttccatagcagctacgctcacagccaaagcctggaccgactaatgaatccactcatcgatcagtatctgtattacttgagtaaggagattaatggtcgtggttctccgcattctaaggcgcagaatcagcagacgttgaagttttcggtagctggtcctagcaacatggctgtccagggaagaaactacatacctggacccagctaccgacaacaacgtgtctcaaccactgtgactcaaaacaacaacagcgaatttgcttggcctggagcttcttcttgggctctcaatggacgtaatagcttgatgaatcctggacctgctatggccagccacaaagaaggagaggaccgtttctttcctttgtctggatctttaatttttggcaaacaaggaactggaagagacaacgtggatgcggacaaagtcatgataaccaacgaagaagaaattaaaactactaacccggtagcaacggagtcctatggacaagtggccacaaaccaccagagtgcccaagcacaggcgcagaccggctgggttcaaaaccaaggaatacttccgggtatggtttggcaggacagagatgtgtacctgcaaggacccatttgggccaaaattcctcacacggacggcaactttcacccttctccgctgatgggagggtttggaatgaagcacccgcctcctcagatcctcatcaaaaacacacctgtacctgcggatcctccaacggccttcaacaaggacaagctgaactctttcatcacccagtattctactggccaagtcagcgtggagatcgagtgggagctgcagaaggaaaacagcaagcgctggaacccggagatccagtacacttccaactattacaagtctaataatgttgaatttgctgttaatactgaaggtgtatatagtgaaccccgccccattggcacgcggtatttaacgaggaactta

SEQ ID NO: 77 - DNA, 2226 bp, synthetic construct
  source 1..2226: mol_type = other DNA
atggctgccgatggttatcttccagattggctcgaggacaaccttagtgaaggaattcgcgagtggtgggctttgaaacctggagcccctcaacccaaggcaaatcaacaacatcaagacaacgctcgaggtcttgtgcttccgggttacaaataccttggacccggcaacggactcgacaagggggagccggtcaacgcagcagacgcggcggccctcgagcacgacaaggcctacgaccagcagctcaaggccggagacaacccgtacctcaagtacaaccacgccgacgccgagttccaggagcggctcaaagaagatacgtcttttgggggcaacctcgggcgagcagtcttccaggccaaaaagaggcttcttgaacctcttggtctggttgaggaagcggctaagacggctcctggaaagaagaggcctgtagagcagtctcctcaggaaccggactcctccgcgggtattggcaaatcgggtgcacagcccgctaaaaagagactcaatttcggtcagactggcgacacagagtcagtcccagaccctcaaccaatcggagaacctcccgcagccccctcaggtgtgggatctcttacaatggcttcaggtggtggcgcaccagtggcagacaataacgaaggtgccgatggagtgggtagttcctcgggaaattggcattgcgattcccaatggctgggggacagagtcatcaccaccagcacccgaacctgggccctgcccacctacaacaatcacctctacaagcaaatctccaacagcacatctggaggatcttcaaatgacaacgcctacttcggctacagcaccccctgggggtattttgacttcaacagattccactgccacttctcaccacgtgactggcagcgactcatcaacaacaactggggattccggcctaagcgactcaacttcaagctcttcaacattcaggtcaaagaggttacggacaacaatggagtcaagaccatcgccaataaccttaccagcacggtccaggtcttcacggactcagactatcagctcccgtacgtgctcgggtcggctcacgagggctgcctcccgccgttcccagcggacgttttcatgattcctcagtacgggtatctgacgcttaatgatggaagccaggccgtgggtcgttcgtccttttactgcctggaatatttcccgtcgcaaatgctaagaacgggtaacaacttccagttcagctacgagtttgagaacgtacctttccatagcagctacgctcacagccaaagcctggaccgactaatgaatccactcatcgatcagtatctgtattacttgagtaagacgtttaatggttctggttctccgcattctaaggcgccgaatctgcagacgttgaagttttcggtagctggtcctagcaacatggctgtccagggaagaaactacatacctggacccagctaccgacaacaacgtgtctcaaccactgtgactcaaaacaacaacagcgaatttgcttggcctggagcttcttcttgggctctcaatggacgtaatagcttgatgaatcctggacctgctatggccagccacaaagaaggagaggaccgtttctttcctttgtctggatctttaatttttggcaaacaaggaactggaagagacaacgtggatgcggacaaagtcatgataaccaacgaagaagaaattaaaactactaacccggtagcaacggagtcctatggacaagtggccacaaaccaccagagtgcccaagcacaggcgcagaccggctgggttcaaaaccaaggaatacttccgggtatggtttggcaggacagagatgtgtacctgcaaggacccatttgggccaaaattcctcacacggacggcaactttcacccttctccgctgatgggagggtttggaatgaagcacccgcctcctcagatcctcatcaaaaacacacctgtacctgcggatcctccaacggccttcaacaaggacaagctgaactctttcatcacccagtattctactggccaagtcagcgtggagatcgagtgggagctgcagaaggaaaacagcaagcgctggaacccggagatccagtacacttccaactattacaagtctaataatgttgaatttgctgttaatactgaaggtgtatatagtgaaccccgccccattggcacgcggtatttaacgaggaactta

SEQ ID NO: 78 - DNA, 2226 bp, synthetic construct
  source 1..2226: mol_type = other DNA
atggctgccgatggttatcttccagattggctcgaggacaaccttagtgaaggaattcgcgagtggtgggctttgaaacctggagcccctcaacccaaggcaaatcaacaacatcaagacaacgctcgaggtcttgtgcttccgggttacaaataccttggacccggcaacggactcgacaagggggagccggtcaacgcagcagacgcggcggccctcgagcacgacaaggcctacgaccagcagctcaaggccggagacaacccgtacctcaagtacaaccacgccgacgccgagttccaggagcggctcaaagaagatacgtcttttgggggcaacctcgggcgagcagtcttccaggccaaaaagaggcttcttgaacctcttggtctggttgaggaagcggctaagacggctcctggaaagaagaggcctgtagagcagtctcctcaggaaccggactcctccgcgggtattggcaaatcgggtgcacagcccgctaaaaagagactcaatttcggtcagactggcgacacagagtcagtcccagaccctcaaccaatcggagaacctcccgcagccccctcaggtgtgggatctcttacaatggcttcaggtggtggcgcaccagtggcagacaataacgaaggtgccgatggagtgggtagttcctcgggaaattggcattgcgattcccaatggctgggggacagagtcatcaccaccagcacccgaacctgggccctgcccacctacaacaatcacctctacaagcaaatctccaacagcacatctggaggatcttcaaatgacaacgcctacttcggctacagcaccccctgggggtattttgacttcaacagattccactgccacttctcaccacgtgactggcagcgactcatcaacaacaactggggattccggcctaagcgactcaacttcaagctcttcaacattcaggtcaaagaggttacggacaacaatggagtcaagaccatcgccaataaccttaccagcacggtccaggtcttcacggactcagactatcagctcccgtacgtgctcgggtcggctcacgagggctgcctcccgccgttcccagcggacgttttcatgattcctcagtacgggtatctgacgcttaatgatggaagccaggccgtgggtcgttcgtccttttactgcctggaatatttcccgtcgcaaatgctaagaacgggtaacaacttccagttcagctacgagtttgagaacgtacctttccatagcagctacgctcacagccaaagcctggaccgactaatgaatccactcatcgatcagtatctgtattacttgagtaagacggagaagacgtctggttctccgcattctaaggcgcagaatcagcagacgttgaagttttcggtagctggtcctagcaacatggctgtccagggaagaaactacatacctggacccagctaccgacaacaacgtgtctcaaccactgtgactcaaaacaacaacagcgaatttgcttggcctggagcttcttcttgggctctcaatggacgtaatagcttgatgaatcctggacctgctatggccagccacaaagaaggagaggaccgtttctttcctttgtctggatctttaatttttggcaaacaaggaactggaagagacaacgtggatgcggacaaagtcatgataaccaacgaagaagaaattaaaactactaacccggtagcaacggagtcctatggacaagtggccacaaaccaccagagtgcccaagcacaggcgcagaccggctgggttcaaaaccaaggaatacttccgggtatggtttggcaggacagagatgtgtacctgcaaggacccatttgggccaaaattcctcacacggacggcaactttcacccttctccgctgatgggagggtttggaatgaagcacccgcctcctcagatcctcatcaaaaacacacctgtacctgcggatcctccaacggccttcaacaaggacaagctgaactctttcatcacccagtattctactggccaagtcagcgtggagatcgagtgggagctgcagaaggaaaacagcaagcgctggaacccggagatccagtacacttccaactattacaagtctaataatgttgaatttgctgttaatactgaaggtgtatatagtgaaccccgccccattggcacgcggtatttaacgaggaactta

SEQ ID NO: 79 - DNA, 2226 bp, synthetic construct
  source 1..2226: mol_type = other DNA
atggctgccgatggttatcttccagattggctcgaggacaaccttagtgaaggaattcgcgagtggtgggctttgaaacctggagcccctcaacccaaggcaaatcaacaacatcaagacaacgctcgaggtcttgtgcttccgggttacaaataccttggacccggcaacggactcgacaagggggagccggtcaacgcagcagacgcggcggccctcgagcacgacaaggcctacgaccagcagctcaaggccggagacaacccgtacctcaagtacaaccacgccgacgccgagttccaggagcggctcaaagaagatacgtcttttgggggcaacctcgggcgagcagtcttccaggccaaaaagaggcttcttgaacctcttggtctggttgaggaagcggctaagacggctcctggaaagaagaggcctgtagagcagtctcctcaggaaccggactcctccgcgggtattggcaaatcgggtgcacagcccgctaaaaagagactcaatttcggtcagactggcgacacagagtcagtcccagaccctcaaccaatcggagaacctcccgcagccccctcaggtgtgggatctcttacaatggcttcaggtggtggcgcaccagtggcagacaataacgaaggtgccgatggagtgggtagttcctcgggaaattggcattgcgattcccaatggctgggggacagagtcatcaccaccagcacccgaacctgggccctgcccacctacaacaatcacctctacaagcaaatctccaacagcacatctggaggatcttcaaatgacaacgcctacttcggctacagcaccccctgggggtattttgacttcaacagattccactgccacttctcaccacgtgactggcagcgactcatcaacaacaactggggattccggcctaagcgactcaacttcaagctcttcaacattcaggtcaaagaggttacggacaacaatggagtcaagaccatcgccaataaccttaccagcacggtccaggtcttcacggactcagactatcagctcccgtacgtgctcgggtcggctcacgagggctgcctcccgccgttcccagcggacgttttcatgattcctcagtacgggtatctgacgcttaatgatggaagccaggccgtgggtcgttcgtccttttactgcctggaatatttcccgtcgcaaatgctaagaacgggtaacaacttccagttcagctacgagtttgagaacgtacctttccatagcagctacgctcacagccaaagcctggaccgactaatgaatccactcatcgatcagtatctgtattacttgagtaagacgatgaatggtcatgattctccgcattctaaggcgcagaatcagcagacgttgaagttttcggtagctggtcctagcaacatggctgtccagggaagaaactacatacctggacccagctaccgacaacaacgtgtctcaaccactgtgactcaaaacaacaacagcgaatttgcttggcctggagcttcttcttgggctctcaatggacgtaatagcttgatgaatcctggacctgctatggccagccacaaagaaggagaggaccgtttctttcctttgtctggatctttaatttttggcaaacaaggaactggaagagacaacgtggatgcggacaaagtcatgataaccaacgaagaagaaattaaaactactaacccggtagcaacggagtcctatggacaagtggccacaaaccaccagagtgcccaagcacaggcgcagaccggctgggttcaaaaccaaggaatacttccgggtatggtttggcaggacagagatgtgtacctgcaaggacccatttgggccaaaattcctcacacggacggcaactttcacccttctccgctgatgggagggtttggaatgaagcacccgcctcctcagatcctcatcaaaaacacacctgtacctgcggatcctccaacggccttcaacaaggacaagctgaactctttcatcacccagtattctactggccaagtcagcgtggagatcgagtgggagctgcagaaggaaaacagcaagcgctggaacccggagatccagtacacttccaactattacaagtctaataatgttgaatttgctgttaatactgaaggtgtatatagtgaaccccgccccattggcacgcggtatttaacgaggaactta

SEQ ID NO: 80 - DNA, 2226 bp, synthetic construct
  source 1..2226: mol_type = other DNA
atggctgccgatggttatcttccagattggctcgaggacaaccttagtgaaggaattcgcgagtggtgggctttgaaacctggagcccctcaacccaaggcaaatcaacaacatcaagacaacgctcgaggtcttgtgcttccgggttacaaataccttggacccggcaacggactcgacaagggggagccggtcaacgcagcagacgcggcggccctcgagcacgacaaggcctacgaccagcagctcaaggccggagacaacccgtacctcaagtacaaccacgccgacgccgagttccaggagcggctcaaagaagatacgtcttttgggggcaacctcgggcgagcagtcttccaggccaaaaagaggcttcttgaacctcttggtctggttgaggaagcggctaagacggctcctggaaagaagaggcctgtagagcagtctcctcaggaaccggactcctccgcgggtattggcaaatcgggtgcacagcccgctaaaaagagactcaatttcggtcagactggcgacacagagtcagtcccagaccctcaaccaatcggagaacctcccgcagccccctcaggtgtgggatctcttacaatggcttcaggtggtggcgcaccagtggcagacaataacgaaggtgccgatggagtgggtagttcctcgggaaattggcattgcgattcccaatggctgggggacagagtcatcaccaccagcacccgaacctgggccctgcccacctacaacaatcacctctacaagcaaatctccaacagcacatctggaggatcttcaaatgacaacgcctacttcggctacagcaccccctgggggtattttgacttcaacagattccactgccacttctcaccacgtgactggcagcgactcatcaacaacaactggggattccggcctaagcgactcaacttcaagctcttcaacattcaggtcaaagaggttacggacaacaatggagtcaagaccatcgccaataaccttaccagcacggtccaggtcttcacggactcagactatcagctcccgtacgtgctcgggtcggctcacgagggctgcctcccgccgttcccagcggacgttttcatgattcctcagtacgggtatctgacgcttaatgatggaagccaggccgtgggtcgttcgtccttttactgcctggaatatttcccgtcgcaaatgctaagaacgggtaacaacttccagttcagctacgagtttgagaacgtacctttccatagcagctacgctcacagccaaagcctggaccgactaatgaatccactcatcgatcagtatctgtattacttgagtaagacgattgatggtcatgattctccgcattctaaggcgcagaatcagcagacgttgaagttttcggtagctggtcctagcaacatggctgtccagggaagaaactacatacctggacccagctaccgacaacaacgtgtctcaaccactgtgactcaaaacaacaacagcgaatttgcttggcctggagcttcttcttgggctctcaatggacgtaatagcttgatgaatcctggacctgctatggccagccacaaagaaggagaggaccgtttctttcctttgtctggatctttaatttttggcaaacaaggaactggaagagacaacgtggatgcggacaaagtcatgataaccaacgaagaagaaattaaaactactaacccggtagcaacggagtcctatggacaagtggccacaaaccaccagagtgcccaagcacaggcgcagaccggctgggttcaaaaccaaggaatacttccgggtatggtttggcaggacagagatgtgtacctgcaaggacccatttgggccaaaattcctcacacggacggcaactttcacccttctccgctgatgggagggtttggaatgaagcacccgcctcctcagatcctcatcaaaaacacacctgtacctgcggatcctccaacggccttcaacaaggacaagctgaactctttcatcacccagtattctactggccaagtcagcgtggagatcgagtgggagctgcagaaggaaaacagcaagcgctggaacccggagatccagtacacttccaactattacaagtctaataatgttgaatttgctgttaatactgaaggtgtatatagtgaaccccgccccattggcacgcggtatttaacgaggaactta

SEQ ID NO: 81 - DNA, 2226 bp, synthetic construct
  source 1..2226: mol_type = other DNA
atggctgccgatggttatcttccagattggctcgaggacaaccttagtgaaggaattcgcgagtggtgggctttgaaacctggagcccctcaacccaaggcaaatcaacaacatcaagacaacgctcgaggtcttgtgcttccgggttacaaataccttggacccggcaacggactcgacaagggggagccggtcaacgcagcagacgcggcggccctcgagcacgacaaggcctacgaccagcagctcaaggccggagacaacccgtacctcaagtacaaccacgccgacgccgagttccaggagcggctcaaagaagatacgtcttttgggggcaacctcgggcgagcagtcttccaggccaaaaagaggcttcttgaacctcttggtctggttgaggaagcggctaagacggctcctggaaagaagaggcctgtagagcagtctcctcaggaaccggactcctccgcgggtattggcaaatcgggtgcacagcccgctaaaaagagactcaatttcggtcagactggcgacacagagtcagtcccagaccctcaaccaatcggagaacctcccgcagccccctcaggtgtgggatctcttacaatggcttcaggtggtggcgcaccagtggcagacaataacgaaggtgccgatggagtgggtagttcctcgggaaattggcattgcgattcccaatggctgggggacagagtcatcaccaccagcacccgaacctgggccctgcccacctacaacaatcacctctacaagcaaatctccaacagcacatctggaggatcttcaaatgacaacgcctacttcggctacagcaccccctgggggtattttgacttcaacagattccactgccacttctcaccacgtgactggcagcgactcatcaacaacaactggggattccggcctaagcgactcaacttcaagctcttcaacattcaggtcaaagaggttacggacaacaatggagtcaagaccatcgccaataaccttaccagcacggtccaggtcttcacggactcagactatcagctcccgtacgtgctcgggtcggctcacgagggctgcctcccgccgttcccagcggacgttttcatgattcctcagtacgggtatctgacgcttaatgatggaagccaggccgtgggtcgttcgtccttttactgcctggaatatttcccgtcgcaaatgctaagaacgggtaacaacttccagttcagctacgagtttgagaacgtacctttccatagcagctacgctcacagccaaagcctggaccgactaatgaatccactcatcgatcagtatctgtattacttgagtaagacgaataatggtcatgattctccgcattctaaggcgcagaatcagcagacgttgaagttttcggtagctggtcctagcaacatggctgtccagggaagaaactacatacctggacccagctaccgacaacaacgtgtctcaaccactgtgactcaaaacaacaacagcgaatttgcttggcctggagcttcttcttgggctctcaatggacgtaatagcttgatgaatcctggacctgctatggccagccacaaagaaggagaggaccgtttctttcctttgtctggatctttaatttttggcaaacaaggaactggaagagacaacgtggatgcggacaaagtcatgataaccaacgaagaagaaattaaaactactaacccggtagcaacggagtcctatggacaagtggccacaaaccaccagagtgcccaagcacaggcgcagaccggctgggttcaaaaccaaggaatacttccgggtatggtttggcaggacagagatgtgtacctgcaaggacccatttgggccaaaattcctcacacggacggcaactttcacccttctccgctgatgggagggtttggaatgaagcacccgcctcctcagatcctcatcaaaaacacacctgtacctgcggatcctccaacggccttcaacaaggacaagctgaactctttcatcacccagtattctactggccaagtcagcgtggagatcgagtgggagctgcagaaggaaaacagcaagcgctggaacccggagatccagtacacttccaactattacaagtctaataatgttgaatttgctgttaatactgaaggtgtatatagtgaaccccgccccattggcacgcggtatttaacgaggaactta

SEQ ID NO: 82 - DNA, 569 bp, synthetic construct
  source 1..569: mol_type = other DNA
ccatggcttagaaggcaagaatcctggctgtggaaagatacctaaaggatcaacagctcctggggatttggggttgctctggaaaactcatttgcaccactgctgtgccttggaatgctagttggagtaataaatctctggaacagatttggaatcacacgacctggatggagtgggacagagaaattaacaattacacaagcttaatacactccttaattgaagaatcgcaaaaccagcaagaaaagaatgaacaagaattattggaattagataaatgggcaagtttgtggaattggtttaacataacaaattggctgtggtatataaaattattcataatgatagtaggaggcttggtaggtttaagaatagtttttgctgtactttctatagtgaatagagttaggcagggatattcaccattatcgtttcagacccacctcccaaccccgaggggacccgacaggcccgaaggaatagaagaagaaggtggagagagagacagagacagatccattcgattagtgaacggatctcgacggtatcgatcacgagactagcctcga

SEQ ID NO: 83 - DNA, 214 bp, synthetic construct
  source 1..214: mol_type = other DNA
gaacgctgacgtcatcaacccgctccaaggaatcgcgggcccagtgtcactaggcgggaacacccagcgcgcgtgcgccctggcaggaagatggctgtgagggacagggagtggcgccctgcaatatttgcatgtcgctatgtgttctgggaaatcaccataaacgtgaaatgtctttggatttgggaatcttataagttctgtatgagaccac

SEQ ID NO: 84 - DNA, 21 bp, synthetic construct
  source 1..21: mol_type = other DNA
  misc_feature 1..19: note = RNA
  misc_feature 20..21: note = DNA
cggaggtctggcctataactt

SEQ ID NO: 85 - DNA, 21 bp, synthetic construct
  source 1..21: mol_type = other DNA
  misc_feature 1..19: note = RNA
  misc_feature 20..21: note = DNA
ggaggtctggcctataaactt

SEQ ID NO: 86 - DNA, 21 bp, synthetic construct
  source 1..21: mol_type = other DNA
  misc_feature 1..19: note = RNA
  misc_feature 20..21: note = DNA
gaggtctggcctataaagctt

SEQ ID NO: 87 - DNA, 21 bp, synthetic construct
  source 1..21: mol_type = other DNA
  misc_feature 1..19: note = RNA
  misc_feature 20..21: note = DNA
aggtctggcctataaagtctt

SEQ ID NO: 88 - DNA, 21 bp, synthetic construct
  source 1..21: mol_type = other DNA
  misc_feature 1..19: note = RNA
  misc_feature 20..21: note = DNA
ggtctggcctataaagtactt

SEQ ID NO: 89 - DNA, 21 bp, synthetic construct
  source 1..21: mol_type = other DNA
  misc_feature 1..19: note = RNA
  misc_feature 20..21: note = DNA
tctggcctataaagtagtctt

SEQ ID NO: 90 - DNA, 21 bp, synthetic construct
  source 1..21: mol_type = other DNA
  misc_feature 1..19: note = RNA
  misc_feature 20..21: note = DNA
ctggcctataaagtagtcctt

SEQ ID NO: 91 - DNA, 21 bp, synthetic construct
  source 1..21: mol_type = other DNA
  misc_feature 1..19: note = RNA
  misc_feature 20..21: note = DNA
tggcctataaagtagtcgctt

SEQ ID NO: 92 - DNA, 21 bp, synthetic construct
  source 1..21: mol_type = other DNA
  misc_feature 1..19: note = RNA
  misc_feature 20..21: note = DNA
ggcctataaagtagtcgcctt

SEQ ID NO: 93 - DNA, 21 bp, synthetic construct
  source 1..21: mol_type = other DNA
  misc_feature 1..19: note = RNA
  misc_feature 20..21: note = DNA
gcctataaagtagtcgcgctt

SEQ ID NO: 94 - DNA, 21 bp, synthetic construct
  source 1..21: mol_type = other DNA
  misc_feature 1..19: note = RNA
  misc_feature 20..21: note = DNA
cctataaagtagtcgcggctt

SEQ ID NO: 95 - DNA, 21 bp, synthetic construct
  source 1..21: mol_type = other DNA
  misc_feature 1..19: note = RNA
  misc_feature 20..21: note = DNA
gtcgtagtctcctgcagcctt

SEQ ID NO: 96 - DNA, 21 bp, synthetic construct
  source 1..21: mol_type = other DNA
  misc_feature 1..19: note = RNA
  misc_feature 20..21: note = DNA
cgtagtctcctgcagcgtctt

SEQ ID NO: 97 - DNA, 21 bp, synthetic construct
  source 1..21: mol_type = other DNA
  misc_feature 1..19: note = RNA
  misc_feature 20..21: note = DNA
gtagtctcctgcagcgtcctt

SEQ ID NO: 98 - DNA, 21 bp, synthetic construct
  source 1..21: mol_type = other DNA
  misc_feature 1..19: note = RNA
  misc_feature 20..21: note = DNA
tagtctcctgcagcgtctctt

SEQ ID NO: 99 - DNA, 21 bp, synthetic construct
  source 1..21: mol_type = other DNA
  misc_feature 1..19: note = RNA
  misc_feature 20..21: note = DNA
atggcgacgaaggccgtgctt

SEQ ID NO: 100 - DNA, 21 bp, synthetic construct
  source 1..21: mol_type = other DNA
  misc_feature 1..19: note = RNA
  misc_feature 20..21: note = DNA
cgacgaaggccgtgtgcgctt

SEQ ID NO: 101 - DNA, 21 bp, synthetic construct
  source 1..21: mol_type = other DNA
  misc_feature 1..19: note = RNA
  misc_feature 20..21: note = DNA
gaaggccgtgtgcgtgctctt

SEQ ID NO: 102 - DNA, 21 bp, synthetic construct
  source 1..21: mol_type = other DNA
  misc_feature 1..19: note = RNA
  misc_feature 20..21: note = DNA
ggccgtgtgcgtgctgaactt

SEQ ID NO: 103 - DNA, 21 bp, synthetic construct
  source 1..21: mol_type = other DNA
  misc_feature 1..19: note = RNA
  misc_feature 20..21: note = DNA
agggcgacggcccagtgcctt

SEQ ID NO: 104 - DNA, 21 bp, synthetic construct
  source 1..21: mol_type = other DNA
  misc_feature 1..19: note = RNA
  misc_feature 20..21: note = DNA
tgcagggcatcatcaattctt

SEQ ID NO: 105 - DNA, 21 bp, synthetic construct
  source 1..21: mol_type = other DNA
  misc_feature 1..19: note = RNA
  misc_feature 20..21: note = DNA
gcagggcatcatcaatttctt

SEQ ID NO: 106 - DNA, 21 bp, synthetic construct
  source 1..21: mol_type = other DNA
  misc_feature 1..19: note = RNA
  misc_feature 20..21: note = DNA
agggcatcatcaatttcgctt

SEQ ID NO: 107 - DNA, 21 bp, synthetic construct
  source 1..21: mol_type = other DNA
  misc_feature 1..19: note = RNA
  misc_feature 20..21: note = DNA
gggcatcatcaatttcgactt

SEQ ID NO: 108 - DNA, 21 bp, synthetic construct
  source 1..21: mol_type = other DNA
  misc_feature 1..19: note = RNA
  misc_feature 20..21: note = DNA
ggcatcatcaatttcgagctt

SEQ ID NO: 109 - DNA, 1406 bp, synthetic construct
  source 1..1406: mol_type = other DNA
ctgcgcgctcgctcgctcactgaggccgcccgggcaaagcccgggcgtcgggcgacctttggtcgcccggcctcagtgagcgagcgagcgcgcagagagggagtgtagccatgctctaggaagatcaattcaattcacgcgtccatggcttagaaggcaagaatcctggctgtggaaagatacctaaaggatcaacagctcctggggatttggggttgctctggaaaactcatttgcaccactgctgtgccttggaatgctagttggagtaataaatctctggaacagatttggaatcacacgacctggatggagtgggacagagaaattaacaattacacaagcttaatacactccttaattgaagaatcgcaaaaccagcaagaaaagaatgaacaagaattattggaattagataaatgggcaagtttgtggaattggtttaacataacaaattggctgtggtatataaaattattcataatgatagtaggaggcttggtaggtttaagaatagtttttgctgtactttctatagtgaatagagttaggcagggatattcaccattatcgtttcagacccacctcccaaccccgaggggacccgacaggcccgaaggaatagaagaagaaggtggagagagagacagagacagatccattcgattagtgaacggatctcgacggtatcgatcacgagactagcctcgagcggccgcaattcgaacgctgacgtcatcaacccgctccaaggaatcgcgggcccagtgtcactaggcgggaacacccagcgcgcgtgcgccctggcaggaagatggctgtgagggacagggagtggcgccctgcaatatttgcatgtcgctatgtgttctgggaaatcaccataaacgtgaaatgtctttggatttgggaatcttataagttctgtatgagaccacaccggtaccgagctctcccgcagaacaccatgcgctccacggaagcaggtcctcactttaatgctgtggccactgagaagtattaaagtgaggacctgcttctgaggagcgccttgacagcagccatgggagggcctcgaggacggggtgaactacgcctgaggatccgatctttttccctctgccaaaaattatggggacatcatgaagccccttgagcatctgacttctggctaataaaggaaatttattttcattgcaatagtgtgttggaattttttgtgtctctcactcggcctaggtagataagtagcatggcgggttaatcattaactacaaggaacccctagtgatggagttggccactccctctctgcgcgctcgctcgctcactgaggccgggcgaccaaaggtcgcccgacgcccgggctttgcccgggcggcctcagtgagcgagcgagcgcgcag

SEQ ID NO: 110 - DNA, 981 bp, Homo sapiens
  source 1..981: mol_type = genomic DNA
gtttggggccagagtgggcgaggcgcggaggtctggcctataaagtagtcgcggagacggggtgctggtttgcgtcgtagtctcctgcagcgtctggggtttccgttgcagtcctcggaaccaggacctcggcgtggcctagcgagttatggcgacgaaggccgtgtgcgtgctgaagggcgacggcccagtgcagggcatcatcaatttcgagcagaaggaaagtaatggaccagtgaaggtgtggggaagcattaaaggactgactgaaggcctgcatggattccatgttcatgagtttggagataatacagcaggctgtaccagtgcaggtcctcactttaatcctctatccagaaaacacggtgggccaaaggatgaagagaggcatgttggagacttgggcaatgtgactgctgacaaagatggtgtggccgatgtgtctattgaagattctgtgatctcactctcaggagaccattgcatcattggccgcacactggtggtccatgaaaaagcagatgacttgggcaaaggtggaaatgaagaaagtacaaagacaggaaacgctggaagtcgtttggcttgtggtgtaattgggatcgcccaataaacattcccttggatgtagtctgaggccccttaactcatctgttatcctgctagctgtagaaatgtatcctgataaacattaaacactgtaatcttaaaagtgtaattgtgtgactttttcagagttgctttaaagtacctgtagtgagaaactgatttatgatcacttggaagatttgtatagttttataaaactcagttaaaatgtctgtttcaatgacctgtattttgccagacttaaatcacagatgggtattaaacttgtcagaatttctttgtcattcaagcctgtgaataaaaaccctgtatggcacttattatgaggctattaaaagaatccaaattcaaactaaaaaaaaaaaaaaaaaa

SEQ ID NO: 111 - DNA, 465 bp, Macaca fascicularis
  source 1..465: mol_type = genomic DNA
atggcgatgaaggccgtgtgcgtgttgaagggcgacagcccagtgcagggcaccatcaatttcgagcagaaggaaagtaatggaccagtgaaggtgtggggaagcattacaggattgactgaaggcctgcatggattccatgttcatcagtttggagataatacacaaggctgtaccagtgcaggtcctcactttaatcctctatccagacaacacggtgggccaaaggatgaagagaggcatgttggagacctgggcaatgtgactgctggcaaagatggtgtggccaaggtgtctttcgaagattctgtgatctcgctctcaggagaccattccatcattggccgcacattggtggtccatgaaaaagcagatgacttgggcaaaggtggaaatgaagaaagtaaaaagacaggaaacgctggaggtcgtctggcttgtggtgtaattgggatcgcccaataa

SEQ ID NO: 112 - DNA, 658 bp, Sus scrofa
  source 1..658: mol_type = genomic DNA
cgtcggcgtgtactgcggcctctcccgctgcttctggtaccctcccagcccggaccggagcgcgcccccgcgagtcatggcgacgaaggccgtgtgtgtgctgaagggcgacggcccggtgcagggcaccatctacttcgagctgaagggagagaagacagtgttagtaacgggaaccattaaaggactggctgaaggtgatcatggattccatgtccatcagtttggagataatacacaaggctgtaccagtgcaggtcctcacttcaatcctgaatccaaaaaacatggtgggccaaaggatcaagagaggcacgttggagacctgggcaatgtgactgctggcaaagatggtgtggccactgtgtacatcgaagattctgtgatcgccctctcgggagaccattccatcattggccgcacaatggtggtccatgaaaaaccagatgacttgggcagaggtggaaatgaagaaagtacaaagacgggaaatgctggaagtcgtttggcctgtggtgtaattgggatcacccagtaaacattccctcatgccatggtctgaatgccagtaactcatctgttatcttgctagttgtagttgtagaaatttaacttgataaacattaaacactgtaaccttaaaaaaaaaaaaaaaaaa

SEQ ID NO: 113 - DNA, 21 bp, synthetic construct
  source 1..21: mol_type = other DNA
  misc_feature 1..19: note = RNA
  misc_feature 20..21: note = DNA
gcatcatcaatttcgagcctt

SEQ ID NO: 114 - DNA, 21 bp, synthetic construct
  source 1..21: mol_type = other DNA
  misc_feature 1..19: note = RNA
  misc_feature 20..21: note = DNA
catcatcaatttcgagcactt

SEQ ID NO: 115 - DNA, 21 bp, synthetic construct
  source 1..21: mol_type = other DNA
  misc_feature 1..19: note = RNA
  misc_feature 20..21: note = DNA
aatttcgagcagaaggaactt

SEQ ID NO: 116 - DNA, 21 bp, synthetic construct
  source 1..21: mol_type = other DNA
  misc_feature 1..19: note = RNA
  misc_feature 20..21: note = DNA
ttcgagcagaaggaaagtctt

SEQ ID NO: 117 - DNA, 21 bp, synthetic construct
  source 1..21: mol_type = other DNA
  misc_feature 1..19: note = RNA
  misc_feature 20..21: note = DNA
tcgagcagaaggaaagtactt

SEQ ID NO: 118 - DNA, 21 bp, synthetic construct
  source 1..21: mol_type = other DNA
  misc_feature 1..19: note = RNA
  misc_feature 20..21: note = DNA
aaggtgtggggaagcattctt

SEQ ID NO: 119 - DNA, 21 bp, synthetic construct
  source 1..21: mol_type = other DNA
  misc_feature 1..19: note = RNA
  misc_feature 20..21: note = DNA
ggtgtggggaagcattaactt

SEQ ID NO: 120 - DNA, 21 bp, synthetic construct
  source 1..21: mol_type = other DNA
  misc_feature 1..19: note = RNA
  misc_feature 20..21: note = DNA
gactgactgaaggcctgcctt

SEQ ID NO: 121 - DNA, 21 bp, synthetic construct
  source 1..21: mol_type = other DNA
  misc_feature 1..19: note = RNA
  misc_feature 20..21: note = DNA
ctgactgaaggcctgcatctt

SEQ ID NO: 122 - DNA, 21 bp, synthetic construct
  source 1..21: mol_type = other DNA
  misc_feature 1..19: note = RNA
  misc_feature 20..21: note = DNA
tgactgaaggcctgcatgctt

SEQ ID NO: 123 - DNA, 21 bp, synthetic construct
  source 1..21: mol_type = other DNA
  misc_feature 1..19: note = RNA
  misc_feature 20..21: note = DNA
tgaaggcctgcatggattctt

SEQ ID NO: 124 - DNA, 21 bp, synthetic construct
  source 1..21: mol_type = other DNA
  misc_feature 1..19: note = RNA
  misc_feature 20..21: note = DNA
gaaggcctgcatggattcctt

SEQ ID NO: 125 - DNA, 1412 bp, synthetic construct
  source 1..1412: mol_type = other DNA
ctgcgcgctcgctcgctcactgaggccgcccgggcaaagcccgggcgtcgggcgacctttggtcgcccggcctcagtgagcgagcgagcgcgcagagagggagtgtagccatgctctaggaagatcaattcaattcacgcgtatagtcttctgcacagggcattctttttgcttcaggatgtttacaacatttgctgcccacttttcctaggtttcttgagacctctacaagagttggagttgacacttggggtactttcttggtgtaacgaactaatagcctgaaaaaaagaagtcatgtgttttcagcaaggcaagaaactgtctaacatagtagataaaacagagaacacttggccggaatcaactaagatgttgctatgttccattcatcatattatctccatctgcagagtagtgggttagtggagggtagaaaacattctcctgaacaactagttaaacttggctttgagttccacctgtaccacttgcataatcttgggaaagtgagttgcctaattcagtgacattaataaatttattaatttcttctttcaataaaacctggagagagcttcatatgtatcagcatatgctaaacttgaaagatacaagtagaaaatggaaggaaatatatctgactcaatagggatagttcaagggttaaattaaaagtagtaaagtattataattaatctgacatggtaccctctagcggccgcaattcgaacgctgacgtcatcaacccgctccaaggaatcgcgggcccagtgtcactaggcgggaacacccagcgcgcgtgcgccctggcaggaagatggctgtgagggacagggagtggcgccctgcaatatttgcatgtcgctatgtgttctgggaaatcaccataaacgtgaaatgtctttggatttgggaatcttataagttctgtatgagaccacaccggtaccgagctctcccgcagaacaccatgcgctccacggaagcaggtcctcactttaatgctgtggccactgagaagtattaaagtgaggacctgcttctgaggagcgccttgacagcagccatgggagggcctcgaggacggggtgaactacgcctgaggatccgatctttttccctctgccaaaaattatggggacatcatgaagccccttgagcatctgacttctggctaataaaggaaatttattttcattgcaatagtgtgttggaattttttgtgtctctcactcggcctaggtagataagtagcatggcgggttaatcattaactacaaggaacccctagtgatggagttggccactccctctctgcgcgctcgctcgctcactgaggccgggcgaccaaaggtcgcccgacgcccgggctttgcccgggcggcctcagtgagcgagcgagcgcgcag

SEQ ID NO: 126 - DNA, 105 bp, synthetic construct
  source 1..105: mol_type = other DNA
ctgcgcgctcgctcgctcactgaggccgcccgggcaaagcccgggcgtcgggcgacctttggtcgcccggcctcagtgagcgagcgagcgcgcagagagggagtg

SEQ ID NO: 127 - DNA, 570 bp, synthetic construct
  source 1..570: mol_type = other DNA
atagtcttctgcacagggcattctttttgcttcaggatgtttacaacatttgctgcccacttttcctaggtttcttgagacctctacaagagttggagttgacacttggggtactttcttggtgtaacgaactaatagcctgaaaaaaagaagtcatgtgttttcagcaaggcaagaaactgtctaacatagtagataaaacagagaacacttggccggaatcaactaagatgttgctatgttccattcatcatattatctccatctgcagagtagtgggttagtggagggtagaaaacattctcctgaacaactagttaaacttggctttgagttccacctgtaccacttgcataatcttgggaaagtgagttgcctaattcagtgacattaataaatttattaatttcttctttcaataaaacctggagagagcttcatatgtatcagcatatgctaaacttgaaagatacaagtagaaaatggaaggaaatatatctgactcaatagggatagttcaagggttaaattaaaagtagtaaagtattataattaatctgacatggtacc

SEQ ID NO: 128 - DNA, 219 bp, synthetic construct
  source 1..219: mol_type = other DNA
aattcgaacgctgacgtcatcaacccgctccaaggaatcgcgggcccagtgtcactaggcgggaacacccagcgcgcgtgcgccctggcaggaagatggctgtgagggacagggagtggcgccctgcaatatttgcatgtcgctatgtgttctgggaaatcaccataaacgtgaaatgtctttggatttgggaatcttataagttctgtatgagaccac

SEQ ID NO: 129 - DNA, 127 bp, unidentified
  source 1..127: mol_type = unassigned DNA
gatctttttccctctgccaaaaattatggggacatcatgaagccccttgagcatctgacttctggctaataaaggaaatttattttcattgcaatagtgtgttggaattttttgtgtctctcactcg

SEQ ID NO: 130 - DNA, 130 bp, synthetic construct
  source 1..130: mol_type = other DNA
aggaacccctagtgatggagttggccactccctctctgcgcgctcgctcgctcactgaggccgggcgaccaaaggtcgcccgacgcccgggctttgcccgggcggcctcagtgagcgagcgagcgcgcag

SEQ ID NO: 131 - DNA, 21 bp, synthetic construct
  source 1..21: mol_type = other DNA
  misc_feature 1..19: note = RNA
  misc_feature 20..21: note = DNA
tgcatggattccatgttcctt

SEQ ID NO: 132 - DNA, 21 bp, synthetic construct
  source 1..21: mol_type = other DNA
  misc_feature 1..19: note = RNA
  misc_feature 20..21: note = DNA
catggattccatgttcatctt

SEQ ID NO: 133 - DNA, 21 bp, synthetic construct
  source 1..21: mol_type = other DNA
  misc_feature 1..19: note = RNA
  misc_feature 20..21: note = DNA
ggattccatgttcatgagctt

SEQ ID NO: 134 - DNA, 21 bp, synthetic construct
  source 1..21: mol_type = other DNA
  misc_feature 1..19: note = RNA
  misc_feature 20..21: note = DNA
ttccatgttcatgagtttctt

SEQ ID NO: 135 - DNA, 21 bp, synthetic construct
  source 1..21: mol_type = other DNA
  misc_feature 1..19: note = RNA
  misc_feature 20..21: note = DNA
gttcatgagtttggagatctt

SEQ ID NO: 136 - DNA, 21 bp, synthetic construct
  source 1..21: mol_type = other DNA
  misc_feature 1..19: note = RNA
  misc_feature 20..21: note = DNA
ttcatgagtttggagatactt

SEQ ID NO: 137 - DNA, 2211 bp, Adeno-associated virus
  source 1..2211: mol_type = genomic DNA
atggctgccgatggttatcttccagattggctcgaggacaaccttagtgaaggaattcgcgagtggtgggctttgaaacctggagcccctcaacccaaggcaaatcaacaacatcaagacaacgctcgaggtcttgtgcttccgggttacaaataccttggacccggcaacggactcgacaagggggagccggtcaacgcagcagacgcggcggccctcgagcacgacaaggcctacgaccagcagctcaaggccggagacaacccgtacctcaagtacaaccacgccgacgccgagttccaggagcggctcaaagaagatacgtcttttgggggcaacctcgggcgagcagtcttccaggccaaaaagaggcttcttgaacctcttggtctggttgaggaagcggctaagacggctcctggaaagaagaggcctgtagagcagtctcctcaggaaccggactcctccgcgggtattggcaaatcgggtgcacagcccgctaaaaagagactcaatttcggtcagactggcgacacagagtcagtcccagaccctcaaccaatcggagaacctcccgcagccccctcaggtgtgggatctcttacaatggcttcaggtggtggcgcaccagtggcagacaataacgaaggtgccgatggagtgggtagttcctcgggaaattggcattgcgattcccaatggctgggggacagagtcatcaccaccagcacccgaacctgggccctgcccacctacaacaatcacctctacaagcaaatctccaacagcacatctggaggatcttcaaatgacaacgcctacttcggctacagcaccccctgggggtattttgacttcaacagattccactgccacttctcaccacgtgactggcagcgactcatcaacaacaactggggattccggcctaagcgactcaacttcaagctcttcaacattcaggtcaaagaggttacggacaacaatggagtcaagaccatcgccaataaccttaccagcacggtccaggtcttcacggactcagactatcagctcccgtacgtgctcgggtcggctcacgagggctgcctcccgccgttcccagcggacgttttcatgattcctcagtacgggtatctgacgcttaatgatggaagccaggccgtgggtcgttcgtccttttactgcctggaatatttcccgtcgcaaatgctaagaacgggtaacaacttccagttcagctacgagtttgagaacgtacctttccatagcagctacgctcacagccaaagcctggaccgactaatgaatccactcatcgaccaatacttgtactatctctcaaagactattaacggttctggacagaatcaacaaacgctaaaattcagtgtggccggacccagcaacatggctgtccagggaagaaactacatacctggacccagctaccgacaacaacgtgtctcaaccactgtgactcaaaacaacaacagcgaatttgcttggcctggagcttcttcttgggctctcaatggacgtaatagcttgatgaatcctggacctgctatggccagccacaaagaaggagaggaccgtttctttcctttgtctggatctttaatttttggcaaacaaggaactggaagagacaacgtggatgcggacaaagtcatgataaccaacgaagaagaaattaaaactactaacccggtagcaacggagtcctatggacaagtggccacaaaccaccagagtgcccaagcacaggcgcagaccggctgggttcaaaaccaaggaatacttccgggtatggtttggcaggacagagatgtgtacctgcaaggacccatttgggccaaaattcctcacacggacggcaactttcacccttctccgctgatgggagggtttggaatgaagcacccgcctcctcagatcctcatcaaaaacacacctgtacctgcggatcctccaacggccttcaacaaggacaagctgaactctttcatcacccagtattctactggccaagtcagcgtggagatcgagtgggagctgcagaaggaaaacagcaagcgctggaacccggagatccagtacacttccaactattacaagtctaataatgttgaatttgctgttaatactgaaggtgtatatagtgaaccccgccccattggcaccagatacctgactcgtaatctgtaa

SEQ ID NO: 138 - protein, 736 aa, Adeno-associated virus
MAADGYLPDWLEDNLSEGIREWWALKPGAPQPKANQQHQDNARGLVLPGYKYLGPGNGLDKGEPVNAADAAALEHDKAYDQQLKAGDNPYLKYNHADAEFQERLKEDTSFGGNLGRAVFQAKKRLLEPLGLVEEAAKTAPGKKRPVEQSPQEPDSSAGIGKSGAQPAKKRLNFGQTGDTESVPDPQPIGEPPAAPSGVGSLTMASGGGAPVADNNEGADGVGSSSGNWHCDSQWLGDRVITTSTRTWALPTYNNHLYKQISNSTSGGSSNDNAYFGYSTPWGYFDFNRFHCHFSPRDWQRLINNNWGFRPKRLNFKLFNIQVKEVTDNNGVKTIANNLTSTVQVFTDSDYQLPYVLGSAHEGCLPPFPADVFMIPQYGYLTLNDGSQAVGRSSFYCLEYFPSQMLRTGNNFQFSYEFENVPFHSSYAHSQSLDRLMNPLIDQYLYYLSKTINGSGQNQQTLKFSVAGPSNMAVQGRNYIPGPSYRQQRVSTTVTQNNNSEFAWPGASSWALNGRNSLMNPGPAMASHKEGEDRFFPLSGSLIFGKQGTGRDNVDADKVMITNEEEIKTTNPVATESYGQVATNHQSAQAQAQTGWVQNQGILPGMVWQDRDVYLQGPIWAKIPHTDGNFHPSPLMGGFGMKHPPPQILIKNTPVPADPPTAFNKDKLNSFITQYSTGQVSVEIEWELQKENSKRWNPEIQYTSNYYKSNNVEFAVNTEGVYSEPRPIGTRYLTRNL

SEQ ID NO: 139 - DNA, 21 bp, synthetic construct
  source 1..21: mol_type = other DNA
  misc_feature 1..19: note = RNA
  misc_feature 20..21: note = DNA
tgagtttggagataatacctt

SEQ ID NO: 140 - DNA, 21 bp, synthetic construct
  source 1..21: mol_type = other DNA
  misc_feature 1..19: note = RNA
  misc_feature 20..21: note = DNA
gagtttggagataatacactt

SEQ ID NO: 141 - DNA, 21 bp, synthetic construct
  source 1..21: mol_type = other DNA
  misc_feature 1..19: note = RNA
  misc_feature 20..21: note = DNA
aggctgtaccagtgcaggctt

SEQ ID NO: 142 - DNA, 21 bp, synthetic construct
  source 1..21: mol_type = other DNA
  misc_feature 1..19: note = RNA
  misc_feature 20..21: note = DNA
ggctgtaccagtgcaggtctt

SEQ ID NO: 143 - DNA, 21 bp, synthetic construct
  source 1..21: mol_type = other DNA
  misc_feature 1..19: note = RNA
  misc_feature 20..21: note = DNA
gcaggtcctcactttaatctt

SEQ ID NO: 144 - DNA, 21 bp, synthetic construct
  source 1..21: mol_type = other DNA
  misc_feature 1..19: note = RNA
  misc_feature 20..21: note = DNA
caggtcctcactttaatcctt

SEQ ID NO: 145 - DNA, 21 bp, synthetic construct
  source 1..21: mol_type = other DNA
  misc_feature 1..19: note = RNA
  misc_feature 20..21: note = DNA
tcactttaatcctctatcctt

SEQ ID NO: 146 - DNA, 21 bp, synthetic construct
  source 1..21: mol_type = other DNA
  misc_feature 1..19: note = RNA
  misc_feature 20..21: note = DNA
ctatccagaaaacacggtctt

SEQ ID NO: 147 - DNA, 21 bp, synthetic construct
  source 1..21: mol_type = other DNA
  misc_feature 1..19: note = RNA
  misc_feature 20..21: note = DNA
tatccagaaaacacggtgctt

SEQ ID NO: 148 - DNA, 21 bp, synthetic construct
  source 1..21: mol_type = other DNA
  misc_feature 1..19: note = RNA
  misc_feature 20..21: note = DNA
atccagaaaacacggtggctt

SEQ ID NO: 149 - DNA, 21 bp, synthetic construct
  source 1..21: mol_type = other DNA
  misc_feature 1..19: note = RNA
  misc_feature 20..21: note = DNA
ccagaaaacacggtgggcctt

SEQ ID NO: 150 - DNA, 21 bp, synthetic construct
  source 1..21: mol_type = other DNA
  misc_feature 1..19: note = RNA
  misc_feature 20..21: note = DNA
gaaaacacggtgggccaactt

SEQ ID NO: 151 - DNA, 21 bp, synthetic construct
  source 1..21: mol_type = other DNA
  misc_feature 1..19: note = RNA
  misc_feature 20..21: note = DNA
aaaacacggtgggccaaactt

SEQ ID NO: 152 - DNA, 21 bp, synthetic construct
  source 1..21: mol_type = other DNA
  misc_feature 1..19: note = RNA
  misc_feature 20..21: note = DNA
cggtgggccaaaggatgactt

SEQ ID NO: 153 - DNA, 21 bp, synthetic construct
  source 1..21: mol_type = other DNA
  misc_feature 1..19: note = RNA
  misc_feature 20..21: note = DNA
aggatgaagagaggcatgctt

SEQ ID NO: 154 - DNA, 21 bp, synthetic construct
  source 1..21: mol_type = other DNA
  misc_feature 1..19: note = RNA
  misc_feature 20..21: note = DNA
atgaagagaggcatgttgctt

SEQ ID NO: 155 - DNA, 21 bp, synthetic construct
  source 1..21: mol_type = other DNA
  misc_feature 1..19: note = RNA
  misc_feature 20..21: note = DNA
gagaggcatgttggagacctt

SEQ ID NO: 156 - DNA, 21 bp, synthetic construct
  source 1..21: mol_type = other DNA
  misc_feature 1..19: note = RNA
  misc_feature 20..21: note = DNA
agaggcatgttggagactctt

SEQ ID NO: 157 - DNA, 21 bp, synthetic construct
  source 1..21: mol_type = other DNA
  misc_feature 1..19: note = RNA
  misc_feature 20..21: note = DNA
atgttggagacttgggcactt

SEQ ID NO: 158 - DNA, 21 bp, synthetic construct
  source 1..21: mol_type = other DNA
  misc_feature 1..19: note = RNA
  misc_feature 20..21: note = DNA
gttggagacttgggcaatctt

SEQ ID NO: 159 - DNA, 21 bp, synthetic construct
  source 1..21: mol_type = other DNA
  misc_feature 1..19: note = RNA
  misc_feature 20..21: note = DNA
ggagacttgggcaatgtgctt

SEQ ID NO: 160 - DNA, 21 bp, synthetic construct
  source 1..21: mol_type = other DNA
  misc_feature 1..19: note = RNA
  misc_feature 20..21: note = DNA
ggcaatgtgactgctgacctt

SEQ ID NO: 161 - DNA, 21 bp, synthetic construct
  source 1..21: mol_type = other DNA
  misc_feature 1..19: note = RNA
  misc_feature 20..21: note = DNA
caatgtgactgctgacaactt

SEQ ID NO: 162 - DNA, 21 bp, synthetic construct
  source 1..21: mol_type = other DNA
  misc_feature 1..19: note = RNA
  misc_feature 20..21: note = DNA
ctgacaaagatggtgtggctt

SEQ ID NO: 163 - DNA, 21 bp, synthetic construct
  source 1..21: mol_type = other DNA
  misc_feature 1..19: note = RNA
  misc_feature 20..21: note = DNA
tgacaaagatggtgtggcctt

SEQ ID NO: 164 - DNA, 21 bp, synthetic construct
  source 1..21: mol_type = other DNA
  misc_feature 1..19: note = RNA
  misc_feature 20..21: note = DNA
ctcaggagaccattgcatctt

SEQ ID NO: 165 - DNA, 21 bp, synthetic construct
  source 1..21: mol_type = other DNA
  misc_feature 1..19: note = RNA
  misc_feature 20..21: note = DNA
tcaggagaccattgcatcctt

SEQ ID NO: 166 - DNA, 21 bp, synthetic construct
  source 1..21: mol_type = other DNA
  misc_feature 1..19: note = RNA
  misc_feature 20..21: note = DNA
agaccattgcatcattggctt

SEQ ID NO: 167 - DNA, 21 bp, synthetic construct
  source 1..21: mol_type = other DNA
  misc_feature 1..19: note = RNA
  misc_feature 20..21: note = DNA
gaccattgcatcattggcctt

SEQ ID NO: 168 - DNA, 21 bp, synthetic construct
  source 1..21: mol_type = other DNA
  misc_feature 1..19: note = RNA
  misc_feature 20..21: note = DNA
attgcatcattggccgcactt

SEQ ID NO: 169 - DNA, 21 bp, synthetic construct
  source 1..21: mol_type = other DNA
  misc_feature 1..19: note = RNA
  misc_feature 20..21: note = DNA
cattggccgcacactggtctt

SEQ ID NO: 170 - DNA, 21 bp, synthetic construct
  source 1..21: mol_type = other DNA
  misc_feature 1..19: note = RNA
  misc_feature 20..21: note = DNA
cgcacactggtggtccatctt

SEQ ID NO: 171 - DNA, 21 bp, synthetic construct
  source 1..21: mol_type = other DNA
  misc_feature 1..19: note = RNA
  misc_feature 20..21: note = DNA
cacactggtggtccatgactt

SEQ ID NO: 172 - DNA, 21 bp, synthetic construct
  source 1..21: mol_type = other DNA
  misc_feature 1..19: note = RNA
  misc_feature 20..21: note = DNA
acactggtggtccatgaactt

SEQ ID NO: 173 - DNA, 21 bp, synthetic construct
  source 1..21: mol_type = other DNA
  misc_feature 1..19: note = RNA
  misc_feature 20..21: note = DNA
tggtggtccatgaaaaagctt

SEQ ID NO: 174 - DNA, 21 bp, synthetic construct
  source 1..21: mol_type = other DNA
  misc_feature 1..19: note = RNA
  misc_feature 20..21: note = DNA
tggtccatgaaaaagcagctt

SEQ ID NO: 175 - DNA, 21 bp, synthetic construct
  source 1..21: mol_type = other DNA
  misc_feature 1..19: note = RNA
  misc_feature 20..21: note = DNA
aaagcagatgacttgggcctt

SEQ ID NO: 176 - DNA, 21 bp, synthetic construct
  source 1..21: mol_type = other DNA
  misc_feature 1..19: note = RNA
  misc_feature 20..21: note = DNA
gcagatgacttgggcaaactt

SEQ ID NO: 177 - DNA, 21 bp, synthetic construct
  source 1..21: mol_type = other DNA
  misc_feature 1..19: note = RNA
  misc_feature 20..21: note = DNA
atgacttgggcaaaggtgctt

SEQ ID NO: 178 - DNA, 21 bp, synthetic construct
  source 1..21: mol_type = other DNA
  misc_feature 1..19: note = RNA
  misc_feature 20..21: note = DNA
tgacttgggcaaaggtggctt

SEQ ID NO: 179 - DNA, 21 bp, synthetic construct
  source 1..21: mol_type = other DNA
  misc_feature 1..19: note = RNA
  misc_feature 20..21: note = DNA
gacttgggcaaaggtggactt

SEQ ID NO: 180 - DNA, 21 bp, synthetic construct
  source 1..21: mol_type = other DNA
  misc_feature 1..19: note = RNA
  misc_feature 20..21: note = DNA
gtacaaagacaggaaacgctt

SEQ ID NO: 181 - DNA, 21 bp, synthetic construct
  source 1..21: mol_type = other DNA
  misc_feature 1..19: note = RNA
  misc_feature 20..21: note = DNA
acaaagacaggaaacgctctt

SEQ ID NO: 182 - DNA, 21 bp, synthetic construct
  source 1..21: mol_type = other DNA
  misc_feature 1..19: note = RNA
  misc_feature 20..21: note = DNA
caaagacaggaaacgctgctt

SEQ ID NO: 183 - DNA, 21 bp, synthetic construct
  source 1..21: mol_type = other DNA
  misc_feature 1..19: note = RNA
  misc_feature 20..21: note = DNA
aggaaacgctggaagtcgctt

SEQ ID NO: 184 - DNA, 21 bp, synthetic construct
  source 1..21: mol_type = other DNA
  misc_feature 1..19: note = RNA
  misc_feature 20..21: note = DNA
gtcgtttggcttgtggtgctt

SEQ ID NO: 185 - DNA, 21 bp, synthetic construct
  source 1..21: mol_type = other DNA
  misc_feature 1..19: note = RNA
  misc_feature 20..21: note = DNA
tcgtttggcttgtggtgtctt

SEQ ID NO: 186 - DNA, 21 bp, synthetic construct
  source 1..21: mol_type = other DNA
  misc_feature 1..19: note = RNA
  misc_feature 20..21: note = DNA
cgtttggcttgtggtgtactt

SEQ ID NO: 187 - DNA, 21 bp, synthetic construct
  source 1..21: mol_type = other DNA
  misc_feature 1..19: note = RNA
  misc_feature 20..21: note = DNA
gtttggcttgtggtgtaactt

SEQ ID NO: 188 - DNA, 21 bp, synthetic construct
  source 1..21: mol_type = other DNA
  misc_feature 1..19: note = RNA
  misc_feature 20..21: note = DNA
ttggcttgtggtgtaattctt

SEQ ID NO: 189 - DNA, 21 bp, synthetic construct
  source 1..21: mol_type = other DNA
  misc_feature 1..19: note = RNA
  misc_feature 20..21: note = DNA
ggcttgtggtgtaattggctt

SEQ ID NO: 190 - DNA, 21 bp, synthetic construct
  source 1..21: mol_type = other DNA
  misc_feature 1..19: note = RNA
  misc_feature 20..21: note = DNA
gcttgtggtgtaattgggctt

SEQ ID NO: 191 - DNA, 21 bp, synthetic construct
  source 1..21: mol_type = other DNA
  misc_feature 1..19: note = RNA
  misc_feature 20..21: note = DNA
cttgtggtgtaattgggactt

SEQ ID NO: 192 - DNA, 21 bp, synthetic construct
  source 1..21: mol_type = other DNA
  misc_feature 1..19: note = RNA
  misc_feature 20..21: note = DNA
tgtggtgtaattgggatcctt

SEQ ID NO: 193 - DNA, 21 bp, synthetic construct
  source 1..21: mol_type = other DNA
  misc_feature 1..19: note = RNA
  misc_feature 20..21: note = DNA
gtggtgtaattgggatcgctt

SEQ ID NO: 194 - DNA, 21 bp, synthetic construct
  source 1..21: mol_type = other DNA
  misc_feature 1..19: note = RNA
  misc_feature 20..21: note = DNA
tggtgtaattgggatcgcctt

SEQ ID NO: 195 - DNA, 21 bp, synthetic construct
  source 1..21: mol_type = other DNA
  misc_feature 1..19: note = RNA
  misc_feature 20..21: note = DNA
gtaattgggatcgcccaactt

SEQ ID NO: 196 - DNA, 21 bp, synthetic construct
  source 1..21: mol_type = other DNA
  misc_feature 1..19: note = RNA
  misc_feature 20..21: note = DNA
taattgggatcgcccaatctt

SEQ ID NO: 197 - DNA, 21 bp, synthetic construct
  source 1..21: mol_type = other DNA
  misc_feature 1..19: note = RNA
  misc_feature 20..21: note = DNA
aattgggatcgcccaatactt

SEQ ID NO: 198 - DNA, 21 bp, synthetic construct
  source 1..21: mol_type = other DNA
  misc_feature 1..19: note = RNA
  misc_feature 20..21: note = DNA
attgggatcgcccaataactt

SEQ ID NO: 199 - DNA, 21 bp, synthetic construct
  source 1..21: mol_type = other DNA
  misc_feature 1..19: note = RNA
  misc_feature 20..21: note = DNA
ttgggatcgcccaataaactt

SEQ ID NO: 200 - protein, 14 aa, synthetic construct
GSGSPHSKAQNQQT

SEQ ID NO: 201 - protein, 14 aa, synthetic construct
GHDSPHKSGQNQQT

SEQ ID NO: 202 - protein, 14 aa, synthetic construct
GSGSPHARMQNQQT

SEQ ID NO: 203 - protein, 14 aa, synthetic construct
GSGSPHVKSQNQQT

SEQ ID NO: 204 - protein, 14 aa, synthetic construct
GQDSPHKSGQNQQT

SEQ ID NO: 205 - protein, 14 aa, synthetic construct
GSGSPHASRQNQQT

SEQ ID NO: 206 - protein, 14 aa, synthetic construct
GSGSPHASRQNKQT

SEQ ID NO: 207 - protein, 14 aa, synthetic construct
GSGSPHVKIQNQQT

SEQ ID NO: 208 - protein, 14 aa, synthetic construct
GSGSPHSKAKNQQT

SEQ ID NO: 209 - protein, 14 aa, synthetic construct
GSGSPHKKNQNQQT

SEQ ID NO: 210 - protein, 14 aa, synthetic construct
GSGSPHVRMQNQQT

SEQ ID NO: 211 - protein, 14 aa, synthetic construct
GSGSPHASRQKQQT

SEQ ID NO: 212 - protein, 14 aa, synthetic construct
GHSSPHRSGQNQQT

SEQ ID NO: 213 - protein, 14 aa, synthetic construct
GMRTYHLSGQNQQT

SEQ ID NO: 214 - protein, 14 aa, synthetic construct
GSGSPHTRGQNQQT

SEQ ID NO: 215 - protein, 14 aa, synthetic construct
GSGIIPVSSQNQQT

SEQ ID NO: 216 - protein, 14 aa, synthetic construct
GSEYGHKSGQNQQT

SEQ ID NO: 217 - protein, 14 aa, synthetic construct
GRGQNVSSVHRQQT

SEQ ID NO: 218 - protein, 14 aa, synthetic construct
GSSHRFYGGQNQQT

SEQ ID NO: 219 - protein, 14 aa, synthetic construct
GYFVAAWSGQNQQT

SEQ ID NO: 220 - protein, 14 aa, synthetic construct
GSVLHSHAAQNQQT

SEQ ID NO: 221 - protein, 14 aa, synthetic construct
GSGDLVVSTQNQQT

SEQ ID NO: 222 - protein, 14 aa, synthetic construct
GSYGMAASGQNQQT

SEQ ID NO: 223 - protein, 14 aa, synthetic construct
GLNHFGASGQNQQT

SEQ ID NO: 224 - protein, 14 aa, synthetic construct
GSTGSHSAGQNQHT

SEQ ID NO: 225 - protein, 14 aa, synthetic construct
GLAGHTVSGQNQQT

SEQ ID NO: 226 - protein, 14 aa, synthetic construct
GIILGASSGQNQQT

SEQ ID NO: 227 - protein, 14 aa, synthetic construct
GSGVSTYNIQNQQT

SEQ ID NO: 228 - protein, 14 aa, synthetic construct
GSLVSVQTGQNQQT

SEQ ID NO: 229 - protein, 14 aa, synthetic construct
GQSSPHRSGQNQQT

SEQ ID NO: 230 - protein, 14 aa, synthetic construct
GREYGHKSGQNQQT

SEQ ID NO: 231 - protein, 14 aa, synthetic construct
GHTLTLSSGQNQQT

SEQ ID NO: 232 - protein, 14 aa, synthetic construct
GSITLIPSGQNQQT

SEQ ID NO: 233 - protein, 14 aa, synthetic construct
GSNGFTALGQNQQT

SEQ ID NO: 234 - protein, 14 aa, synthetic construct
GSGHSSHSVQNQQT

SEQ ID NO: 235 - protein, 14 aa, synthetic construct
GSGIPQRSGKNQQT

SEQ ID NO: 236 - protein, 14 aa, synthetic construct
GSGDTLHMLQNQQT

SEQ ID NO: 237 - protein, 14 aa, synthetic construct
GERHTVLSGQNQQT

SEQ ID NO: 238 - protein, 14 aa, synthetic construct
GSGMPQSHIQNQQT

SEQ ID NO: 239 - protein, 14 aa, synthetic construct
GSGQLSGIGGNQQT

SEQ ID NO: 240 - protein, 14 aa, synthetic construct
GSGQNRKPASFAQT

SEQ ID NO: 241 - protein, 14 aa, synthetic construct
GSGSVSQLGQNQQT

SEQ ID NO: 242 - protein, 14 aa, synthetic construct
GSDFLGTHGQNQQT

SEQ ID NO: 243 - protein, 14 aa, synthetic construct
GQIVQNPSGQNQQT

SEQ ID NO: 244 - protein, 14 aa, synthetic construct
GSGTQIPSQQNQQT

SEQ ID NO: 245 - protein, 14 aa, synthetic construct
GSGQNQQSAREGLT

SEQ ID NO: 246 - protein, 14 aa, synthetic construct
GSGLGMSTGQNQQT

SEQ ID NO: 247 - protein, 14 aa, synthetic construct
GSGLPVLSGQNQQT

SEQ ID NO: 248 - protein, 14 aa, synthetic construct
GSGHSIRTDQNQQT

SEQ ID NO: 249 - protein, 14 aa, synthetic construct
GSGQSVQTVVNQQT

SEQ ID NO: 250 - protein, 14 aa, synthetic construct
GSGQNRAQSRFQQT

SEQ ID NO: 251 - protein, 14 aa, synthetic construct
GGGDLGRSSQNQQT

SEQ ID NO: 252 - protein, 14 aa, synthetic construct
GGGTKMDSGQNQQT

SEQ ID NO: 253 - protein, 14 aa, synthetic construct
GSGSPHPSRQNQQT

SEQ ID NO: 254 - protein, 14 aa, synthetic construct
GSGQFTNAGMNQQT

SEQ ID NO: 255 - protein, 14 aa, synthetic construct
GGRNGHTVGQNQQT

SEQ ID NO: 256 - protein, 14 aa, synthetic construct
GSGFGPQTGQNQQT

SEQ ID NO: 257 - protein, 14 aa, synthetic construct
GRTDSHTSGQNQQT

SEQ ID NO: 258 - protein, 14 aa, synthetic construct
GYEVLGSSGQNQQT

SEQ ID NO: 259 - protein, 14 aa, synthetic construct
GSVHLSVTGQNQQT

SEQ ID NO: 260 - protein, 14 aa, synthetic construct
GFMSYKGSGQNQQT

SEQ ID NO: 261 - protein, 14 aa, synthetic construct
GNIAGSVSGQNQQT

SEQ ID NO: 262 - protein, 14 aa, synthetic construct
GSGSHRDVSQNQQT

SEQ ID NO: 263 - protein, 14 aa, synthetic construct
GGLGSMSSGQNQQT

SEQ ID NO: 264 - protein, 14 aa, synthetic construct
GSGHLPQSAQNQQT

SEQ ID NO: 265 - protein, 14 aa, synthetic construct
GGVLVGGSGQNQQT

SEQ ID NO: 266 - protein, 14 aa, synthetic construct
GTHPYTSSGQNQQT

SEQ ID NO: 267 - protein, 14 aa, synthetic construct
GSGQNQQLKENRST

SEQ ID NO: 268 - protein, 14 aa, synthetic construct
GSGQNQQTSPHNHT

SEQ ID NO: 269 - protein, 14 aa, synthetic construct
GSGTLYPQSQNQQT

SEQ ID NO: 270 - protein, 14 aa, synthetic construct
GSGQNQQSNWITKT

SEQ ID NO: 271 - protein, 14 aa, synthetic construct
GSGYTSLFLQNQQT

SEQ ID NO: 272 - protein, 14 aa, synthetic construct
GSGVMTHVLQNQQT

SEQ ID NO: 273 - protein, 14 aa, synthetic construct
GSVSDVRAGQNQQT

SEQ ID NO: 274 - protein, 14 aa, synthetic construct
GSGQSHMATLNQQT

SEQ ID NO: 275 - protein, 14 aa, synthetic construct
GSGLSVHLAQNQQT

SEQ ID NO: 276 - protein, 14 aa, synthetic construct
GSGLSHATQQNQQT

SEQ ID NO: 277 - protein, 14 aa, synthetic construct
GSGLSVQSGQNQQT

SEQ ID NO: 278 - protein, 14 aa, synthetic construct
GSGHMTYREKNQQT

SEQ ID NO: 279 - protein, 14 aa, synthetic construct
GSKGVPTPGQNQQT

SEQ ID NO: 280 - protein, 14 aa, synthetic construct
GSGLLPLSSQNQQT

SEQ ID NO: 281 - protein, 14 aa, synthetic construct
GNGLYAVSGQNQQT

SEQ ID NO: 282 - protein, 14 aa, synthetic construct
GFNGSPSSGQNQQT

SEQ ID NO: 283 - protein, 14 aa, synthetic construct
GSGQIRHSDQNQQT

SEQ ID NO: 284 - protein, 14 aa, synthetic construct
GGQVAPSSGQNQQT

SEQ ID NO: 285 - protein, 14 aa, synthetic construct
GSFSMHTHGQNQQT

SEQ ID NO: 286 - protein, 14 aa, synthetic construct
GSGQNQQVIQGSNT

SEQ ID NO: 287 - protein, 14 aa, synthetic construct
GRVLHSHAGQNQQT

SEQ ID NO: 288 - protein, 14 aa, synthetic construct
GSGQNQQTSLQDQT

SEQ ID NO: 289 - protein, 14 aa, synthetic construct
GSGLGRAPVQNQQT

SEQ ID NO: 290 - protein, 14 aa, synthetic construct
GNGFSSASGQNQQT

SEQ ID NO: 291 - protein, 14 aa, synthetic construct
GSGQMASRESNQQT

SEQ ID NO: 292 - protein, 14 aa, synthetic construct
GPGLPNHSGQNQQT

SEQ ID NO: 293 - protein, 14 aa, synthetic construct
GNIQWQGSGQNQQT

SEQ ID NO: 294 - protein, 14 aa, synthetic construct
GMSAHMSSGQNQQT

SEQ ID NO: 295 - protein, 14 aa, synthetic construct
GHSFVNRSGQNQQT

SEQ ID NO: 296 - protein, 14 aa, synthetic construct
GRAVMDHSGQNQQT

SEQ ID NO: 297 - protein, 14 aa, synthetic construct
GALTVMQSGQNQQT

SEQ ID NO: 298 - protein, 14 aa, synthetic construct
GSGQRSPVLPNQQT

SEQ ID NO: 299 - protein, 14 aa, synthetic construct
GSGQNGHLSLKQQT

SEQ ID NO: 300 - protein, 14 aa, synthetic construct
GSLPRGTSDQNQQT

SEQ ID NO: 301 - protein, 14 aa, synthetic construct
GVAGSLVSGQNQQT

SEQ ID NO: 302 - protein, 14 aa, synthetic construct
GRGGIPQSGQNQQT

SEQ ID NO: 303 - protein, 14 aa, synthetic construct
GSGQYASSIPNQQT

SEQ ID NO: 304 - protein, 14 aa, synthetic construct
GTDFGRQSSQNQQT

SEQ ID NO: 305 - protein, 14 aa, synthetic construct
GIFMQTPSGQNQQT

SEQ ID NO: 306 - protein, 14 aa, synthetic construct
GSGQNQQTRLVDLT

SEQ ID NO: 307 - protein, 14 aa, synthetic construct
GTREMPLSGQNQQT

SEQ ID NO: 308 - protein, 14 aa, synthetic construct
GSRLVHVHGQNQQT

SEQ ID NO: 309 - protein, 14 aa, synthetic construct
GSGRLVPNGPNQQT

SEQ ID NO: 310 - protein, 14 aa, synthetic construct
GSGYLRESPQNQQT

SEQ ID NO: 311 - protein, 14 aa, synthetic construct
GARIQNASGQKQQT

SEQ ID NO: 312 - protein, 14 aa, synthetic construct
GLSNPMPSGQNQQT

SEQ ID NO: 313 - protein, 14 aa, synthetic construct
GSTVQDTRGQNQQT

SEQ ID NO: 314 - protein, 14 aa, synthetic construct
GPFGMPSSGQNQQT

SEQ ID NO: 315 - protein, 14 aa, synthetic construct
GSGQNHGVLSNQQT

SEQ ID NO: 316 - protein, 14 aa, synthetic construct
GSGYSMSQAQNQQT

SEQ ID NO: 317 - protein, 14 aa, synthetic construct
GSGMLTHTLQNQQT

SEQ ID NO: 318 - protein, 14 aa, synthetic construct
GRGSPHASRQNQQT

SEQ ID NO: 319 - protein, 14 aa, synthetic construct
GLSWPSTSGQNQQT

SEQ ID NO: 320 - protein, 14 aa, synthetic construct
GNSMERTSGQNQQT

SEQ ID NO: 321 - protein, 14 aa, synthetic construct
GSGMSPSTLQNQQT

SEQ ID NO: 322 - protein, 14 aa, synthetic construct
GSGHGQVLSQNQQT

SEQ ID NO: 323 - protein, 14 aa, synthetic construct
GRGQIYSTGGNQQT

SEQ ID NO: 324 - protein, 14 aa, synthetic construct
GVVAAHNSGQNQQT

SEQ ID NO: 325 - protein, 14 aa, synthetic construct
GDSSLRHSGQNQQT

SEQ ID NO: 326 - protein, 14 aa, synthetic construct
GSLVSQGAGQNQQT

SEQ ID NO: 327 - protein, 14 aa, synthetic construct
GSLLQAHSGQNQQT

SEQ ID NO: 328 - protein, 14 aa, synthetic construct
GSGHIYVGIQNQQT

SEQ ID NO: 329 - protein, 14 aa, synthetic construct
GHHTTVQSGQNQQT

SEQ ID NO: 330 - protein, 14 aa, synthetic construct
GSRQSKRNELNQQT

SEQ ID NO: 331 - protein, 14 aa, synthetic construct
GSGQNQQHVSSPRT

SEQ ID NO: 332 - protein, 14 aa, synthetic construct
GSSKELLWGQNQQT

SEQ ID NO: 333 - protein, 14 aa, synthetic construct
GSLSTPSSGQNQQT

SEQ ID NO: 334 - protein, 14 aa, synthetic construct
GSIGYAGQGQNQQT

SEQ ID NO: 335 - protein, 14 aa, synthetic construct
GSGQNQRVSNSQQT

SEQ ID NO: 336 - protein, 14 aa, synthetic construct
GSGYASHVQQNQQT

SEQ ID NO: 337 - protein, 14 aa, synthetic construct
GSGEYSRSGQNQQT

SEQ ID NO: 338 - protein, 14 aa, synthetic construct
GSVSTHSSGQNQQT

SEQ ID NO: 339 - protein, 14 aa, synthetic construct
GSGQNQHSLGNYQT

SEQ ID NO: 340 - protein, 14 aa, synthetic construct
GSGGLDTRGQNQQT

SEQ ID NO: 341 - protein, 14 aa, synthetic construct
GNILHATSGQNQQT

SEQ ID NO: 342 - protein, 14 aa, synthetic construct
GSGQSYTMTQNQQT

SEQ ID NO: 343 - protein, 14 aa, synthetic construct
GSGQNQHSAPNSQT

SEQ ID NO: 344 - protein, 14 aa, synthetic construct
GSGQNQQTMDHNRT

SEQ ID NO: 345 - protein, 14 aa, synthetic construct
GSNGGVGTGQNQQT

SEQ ID NO: 346 - protein, 14 aa, synthetic construct
GAGSIIPSGQNQQT

SEQ ID NO: 347 - protein, 14 aa, synthetic construct
GSGQTHGGQHNQQT

SEQ ID NO: 348 - protein, 14 aa, synthetic construct
GSNLSFQSGQNQQT

SEQ ID NO: 349 - protein, 14 aa, synthetic construct
GATLQVHSGQNQQT

SEQ ID NO: 350 - protein, 14 aa, synthetic construct
GSGFNQRSEQNQQT

SEQ ID NO: 351 - protein, 14 aa, synthetic construct
GSGSLRDFDQNQQT

SEQ ID NO: 352 - protein, 14 aa, synthetic construct
GSGDSITGKQNQQT

SEQ ID NO: 353 - protein, 14 aa, synthetic construct
GSGQDRNIVQNQQT

SEQ ID NO: 354 - protein, 14 aa, synthetic construct
GSGLSHSHQQNQQT

SEQ ID NO: 355 - protein, 14 aa, synthetic construct
GSGQNQQTGMSSVK

SEQ ID NO: 356 - protein, 14 aa, synthetic construct
GSVTHGISGQNQQT

SEQ ID NO: 357 - protein, 14 aa, synthetic construct
GVVAHQPSGQNQQT

SEQ ID NO: 358 - protein, 14 aa, synthetic construct
GSGPILGQLQNQQT

SEQ ID NO: 359 - protein, 14 aa, synthetic construct
GSGHVPNSGLNQQT

SEQ ID NO: 360 - protein, 14 aa, synthetic construct
GDAGVRSSGQNQQT

SEQ ID NO: 361 - protein, 14 aa, synthetic construct
GSGSQLMSLQNQQT

SEQ ID NO: 362 - protein, 14 aa, synthetic construct
GSGLDYSQRQNQQT

SEQ ID NO: 363 - protein, 14 aa, synthetic construct
GSGQSSGRLINKQT

SEQ ID NO: 364 - protein, 14 aa, synthetic construct
GSSVSPSSGQNQQT

SEQ ID NO: 365 - protein, 14 aa, synthetic construct
GSGQVVGLSGNQQT

SEQ ID NO: 366 - protein, 14 aa, synthetic construct
GSNMGVPLGQNQQT

SEQ ID NO: 367 - protein, 14 aa, synthetic construct
GSFYPSSTGQNQQT

SEQ ID NO: 368 - protein, 14 aa, synthetic construct
GSGQNQQTRLTDLT

SEQ ID NO: 369 - protein, 14 aa, synthetic construct
GPTNGRSSGQNQQT

SEQ ID NO: 370 - protein, 14 aa, synthetic construct
GSGLLHGKLQNQQT

SEQ ID NO: 371 - protein, 14 aa, synthetic construct
GANMGHVSGQNQQT

SEQ ID NO: 372 - protein, 14 aa, synthetic construct
GSGQNQQSGRGDLT

SEQ ID NO: 373 - protein, 14 aa, synthetic construct
GSHGHYASGQKQQT

SEQ ID NO: 374 - protein, 14 aa, synthetic construct
GSGDLRISPQNQQT

SEQ ID NO: 375 - protein, 14 aa, synthetic construct
GSGMPVILGQNQQT

SEQ ID NO: 376 - protein, 14 aa, synthetic construct
GRGVITSSGQNHQT

SEQ ID NO: 377 - protein, 14 aa, synthetic construct
GSGHSVSGPQNQQT

SEQ ID NO: 378 - protein, 14 aa, synthetic construct
GSRNGHTVGRNQQT

SEQ ID NO: 379 - protein, 14 aa, synthetic construct
GAGVHMVSGQNQQT

SEQ ID NO: 380 - protein, 14 aa, synthetic construct
GSGQNHRPSVLQQT

SEQ ID NO: 381 - protein, 14 aa, synthetic construct
GSGSPRDSIQNQQT

SEQ ID NO: 382 - protein, 14 aa, synthetic construct
GSGQGIHSSVNQQT

SEQ ID NO: 383 - protein, 14 aa, synthetic construct
GSGQQLSITPNQQT

SEQ ID NO: 384 - protein, 14 aa, synthetic construct
GGYHSQTSGQNQQT

SEQ ID NO: 385 - protein, 14 aa, synthetic construct
GSLHHDNHGQNQQT

SEQ ID NO: 386 - protein, 14 aa, synthetic construct
GIMARDSSGQNQQT

SEQ ID NO: 387 - protein, 14 aa, synthetic construct
GVVHITNSGQNQQT

SEQ ID NO: 388 - protein, 14 aa, synthetic construct
GSGQNQHSAPFNQT

SEQ ID NO: 389 - protein, 14 aa, synthetic construct
GSGQTSGLKQNQQT

SEQ ID NO: 390 - protein, 14 aa, synthetic construct
GSGQNQQTSLSNTA

SEQ ID NO: 391 - protein, 14 aa, synthetic construct
GSGQNQAVHNKSQT

SEQ ID NO: 392 - protein, 14 aa, synthetic construct
GVHTHLPSGQNQQT

SEQ ID NO: 393 - protein, 14 aa, synthetic construct
GHLTMHNSGQNHQT

SEQ ID NO: 394 - protein, 14 aa, synthetic construct
GSGSSSRPYQNQQT

SEQ ID NO: 395 - protein, 14 aa, synthetic construct
GILLATPSGQNQQT

SEQ ID NO: 396 - protein, 14 aa, synthetic construct
GSGQNAGSFPNQQT

SEQ ID NO: 397 - protein, 14 aa, synthetic construct
GSRDGHTVGQNQQT

SEQ ID NO: 398 - protein, 14 aa, synthetic construct
GSLLISTSGQNQQT

SEQ ID NO: 399 - protein, 14 aa, synthetic construct
GSGAMPSHGQNQQT

SEQ ID NO: 400 - protein, 14 aa, synthetic construct
GALVSPISGQNQQT

SEQ ID NO: 401 - protein, 14 aa, synthetic construct
GSLSSHGVGQNQQT

SEQ ID NO: 402 - protein, 14 aa, synthetic construct
GSGQNQQASLAMRT

SEQ ID NO: 403 - protein, 14 aa, synthetic construct
GPGLGSHSGQNQQT

SEQ ID NO: 404 - protein, 14 aa, synthetic construct
GHDSQHKSGQNQQT

SEQ ID NO: 405 - protein, 14 aa, synthetic construct
GSGLTLSATQNQQT

SEQ ID NO: 406 - protein, 14 aa, synthetic construct
GSGQVVAHVGNQQT

SEQ ID NO: 407 - protein, 14 aa, synthetic construct
GSGLRTMTTQNQQT

SEQ ID NO: 408 - protein, 14 aa, synthetic construct
GSGQVGRLLQNQQT

SEQ ID NO: 409 - protein, 14 aa, synthetic construct
GSGQLSHQSVNQQT

SEQ ID NO: 410 - protein, 14 aa, synthetic construct
GSGDRYQTLQNQQT

SEQ ID NO: 411 - protein, 14 aa, synthetic construct
GSGQNQQLKSSAQT

SEQ ID NO: 412 - protein, 14 aa, synthetic construct
GSGQNQYSIPVAQT

SEQ ID NO: 413 - protein, 14 aa, synthetic construct
GSGERLHLTQNQQT

SEQ ID NO: 414 - protein, 14 aa, synthetic construct
GSGHNQQVRTAPNT

SEQ ID NO: 415 - protein, 14 aa, synthetic construct
GGLSHVMSGQNQQT

SEQ ID NO: 416 - protein, 14 aa, synthetic construct
GSGQSHRDVLNQQT

SEQ ID NO: 417 - protein, 14 aa, synthetic construct
GSGQNLAGRMDQQT

SEQ ID NO: 418 - protein, 14 aa, synthetic construct
GSGQNQQTNRGNPM

SEQ ID NO: 419 - protein, 14 aa, synthetic construct
GSGQSYQRDHNQQT

SEQ ID NO: 420 - protein, 14 aa, synthetic construct
GSLLSAGMGQNQHT

SEQ ID NO: 421 - protein, 14 aa, synthetic construct
GSGQNQQTAIYRNI

SEQ ID NO: 422 - protein, 14 aa, synthetic construct
GSGQNQQTSGTTNC

SEQ ID NO: 423 - protein, 14 aa, synthetic construct
GMTSHSVSGQNQQT

SEQ ID NO: 424 - protein, 14 aa, synthetic construct
GSSQSTGYQPNQQT

SEQ ID NO: 425 - protein, 14 aa, synthetic construct
GSLKPTTLGQNQQT

SEQ ID NO: 426 - protein, 14 aa, synthetic construct
GRMFSLGSGQNQQT

SEQ ID NO: 427 - protein, 14 aa, synthetic construct
GSGQNQQTALGVKC

SEQ ID NO: 428 - protein, 14 aa, synthetic construct
GAMVSHSSGQNQQT

SEQ ID NO: 429 - protein, 14 aa, synthetic construct
GSGQNQQRNSDSVT

SEQ ID NO: 430 - protein, 14 aa, synthetic construct
GSGQSMTLHLNQQT

SEQ ID NO: 431 - protein, 14 aa, synthetic construct
GSGQVHQAEVNQQT

SEQ ID NO: 432 - protein, 14 aa, synthetic construct
GSGQNQSQNHLQQT

SEQ ID NO: 433 - protein, 14 aa, synthetic construct
GSLLTTASGQNQQT

SEQ ID NO: 434 - protein, 14 aa, synthetic construct
GSGLIRTAAQNQQT

SEQ ID NO: 435 - protein, 14 aa, synthetic construct
GSGQNQQTVSRQST

SEQ ID NO: 436 - protein, 14 aa, synthetic construct
GSGQYANHGINQQT

SEQ ID NO: 437 - protein, 14 aa, synthetic construct
GSRSTGPSGQNQQT

SEQ ID NO: 438 - protein, 14 aa, synthetic construct
GRGVQQKLQQNQQT

SEQ ID NO: 439 - protein, 14 aa, synthetic construct
GSGQNQQVHLSTGT

SEQ ID NO: 440 - protein, 14 aa, synthetic construct
GSGQNQQLSAKSST

SEQ ID NO: 441 - protein, 14 aa, synthetic construct
GSGYKAARPQNQQT

SEQ ID NO: 442 - protein, 14 aa, synthetic construct
GSAGISPSGQNQQT

SEQ ID NO: 443 - protein, 14 aa, synthetic construct
GSGQNRAHAFLQQT

SEQ ID NO: 444 - protein, 14 aa, synthetic construct
GSGLSGITMQNQQT

SEQ ID NO: 445 - protein, 14 aa, synthetic construct
GPGSAHSSGQNQQT

SEQ ID NO: 446 - protein, 14 aa, synthetic construct
GSSHTQALGQNQQT

SEQ ID NO: 447 - protein, 14 aa, synthetic construct
GSGVHGVSSQNQQT

SEQ ID NO: 448 - protein, 14 aa, synthetic construct
GSSGRDMGGQNQQT

SEQ ID NO: 449 - protein, 14 aa, synthetic construct
GERAFPTSGQNQQT

SEQ ID NO: 450 - protein, 14 aa, synthetic construct
GGRIVSLSGQNQQT

SEQ ID NO: 451 - protein, 14 aa, synthetic construct
GSGQNSYSHTSQQT

SEQ ID NO: 452 - protein, 14 aa, synthetic construct
GLGYPGSSGQNQQT

SEQ ID NO: 453 - protein, 14 aa, synthetic construct
GSGPQSHTGQNQQT

SEQ ID NO: 454 - protein, 14 aa, synthetic construct
GSGQNQQLSRDAST

SEQ ID NO: 455 - protein, 14 aa, synthetic construct
GSGQILHSVPNQQT

SEQ ID NO: 456 - protein, 14 aa, synthetic construct
GSGFHTDSRQNQQT

SEQ ID NO: 457 - protein, 14 aa, synthetic construct
GSGQSHSLATNQQT

SEQ ID NO: 458 - protein, 14 aa, synthetic construct
GSGQNQQTLSKPWT

SEQ ID NO: 459 - protein, 14 aa, synthetic construct
GSGHAAISQQNQQT

SEQ ID NO: 460 - protein, 14 aa, synthetic construct
GSGQNQQQIGGNST

SEQ ID NO: 461 - protein, 14 aa, synthetic construct
GGGPMAGSGQNQQT

SEQ ID NO: 462 - protein, 14 aa, synthetic construct
GMRMEYQSGQNQQT

SEQ ID NO: 463 - protein, 14 aa, synthetic construct
GSGQNQQGTLLHQT

SEQ ID NO: 464 - protein, 14 aa, synthetic construct
GSGQNQRSSGGVQT

SEQ ID NO: 465 - protein, 14 aa, synthetic construct
GSGQNQRGALATQT

SEQ ID NO: 466 - protein, 14 aa, synthetic construct
GSGTVHAATQNQQT

SEQ ID NO: 467 - protein, 14 aa, synthetic construct
GSRMTQQFGQNQQT

SEQ ID NO: 468 - protein, 14 aa, synthetic construct
GSSSPGASGQNQQT

SEQ ID NO: 469 - protein, 14 aa, synthetic construct
GHPSPHVSGQNQQT

SEQ ID NO: 470 - protein, 14 aa, synthetic construct
GSGSHHASRQNQQT

SEQ ID NO: 471 - protein, 14 aa, synthetic construct
GAVGHSYSGQNQQT

SEQ ID NO: 472 - protein, 14 aa, synthetic construct
GSRSQYDIGQNQQT

SEQ ID NO: 473 - protein, 14 aa, synthetic construct
GSGQGPQERGNQQT

SEQ ID NO: 474 - protein, 14 aa, synthetic construct
GSIAHVGTGQNQQT

SEQ ID NO: 475 - protein, 14 aa, synthetic construct
GSGQNQQKQNHGNT

SEQ ID NO: 476 - protein, 14 aa, synthetic construct
GSGQNQQALGSQRT

SEQ ID NO: 477 - protein, 14 aa, synthetic construct
GSGAITHMPQNQQT

SEQ ID NO: 478 - protein, 14 aa, synthetic construct
GSGQRNPLLLNQQT

SEQ ID NO: 479 - protein, 14 aa, synthetic construct
GSSGIPVSHQNQQT

SEQ ID NO: 480 - protein, 14 aa, synthetic construct
GVHSLTPSGQNQQT

SEQ ID NO: 481 - protein, 14 aa, synthetic construct
GVIVLHGSGQNQQT

SEQ ID NO: 482 - protein, 14 aa, synthetic construct
GGTRVVDSGQNQQT

SEQ ID NO: 483 - protein, 14 aa, synthetic construct
GSGGVTYQSQNQQT

SEQ ID NO: 484 - protein, 14 aa, synthetic construct
GSGQNQAGHGPGQT

SEQ ID NO: 485 - protein, 14 aa, synthetic construct
GSGQLVTSGPNQQT

SEQ ID NO: 486 - protein, 14 aa, synthetic construct
GSGIAAQRTQNQQT

SEQ ID NO: 487 - protein, 14 aa, synthetic construct
GSTPAGVGGQNQQT

SEQ ID NO: 488 - protein, 14 aa, synthetic construct
GSGQNQQTSTGVHS

SEQ ID NO: 489 - protein, 14 aa, synthetic construct
GSGQIRQLVDNQQT

SEQ ID NO: 490 - protein, 14 aa, synthetic construct
GSLIGMQSGQNQQT

SEQ ID NO: 491 - protein, 14 aa, synthetic construct
GSGQIKGKMDNQQT

SEQ ID NO: 492 - protein, 14 aa, synthetic construct
GSGSDMSSWQNQQT

SEQ ID NO: 493 - protein, 14 aa, synthetic construct
GRGQNQQHTGLATT

SEQ ID NO: 494 - protein, 14 aa, synthetic construct
GSGQNQQTLYSSNT

SEQ ID NO: 495 - protein, 14 aa, synthetic construct
GSGQTQVLKSNQQT

SEQ ID NO: 496 - protein, 14 aa, synthetic construct
GSRTLSNVGQNQQT

SEQ ID NO: 497 - protein, 14 aa, synthetic construct
GSGVQHSLPQNQQT

SEQ ID NO: 498 - protein, 14 aa, synthetic construct
GNYLHQASGQNQQT

SEQ ID NO: 499 - protein, 14 aa, synthetic construct
GSGGTSVHQQNQQT

SEQ ID NO: 500 - protein, 14 aa, synthetic construct
GMDHSRPSGQNQQT

SEQ ID NO: 501 - protein, 14 aa, synthetic construct
GSGQNQQSMGTFTT

SEQ ID NO: 502 - protein, 14 aa, synthetic construct
GSGQNQQTPLRPPT

SEQ ID NO: 503 - protein, 14 aa, synthetic construct
GSGQNQHHSVSQQT

SEQ ID NO: 504 - protein, 14 aa, synthetic construct
GSGQLRSLSTNQQT

SEQ ID NO: 505 - protein, 14 aa, synthetic construct
GSGSPRQLSQNQQT

SEQ ID NO: 506 - protein, 14 aa, synthetic construct
GSGQNQQTTASSHT

SEQ ID NO: 507 - protein, 14 aa, synthetic construct
GRGQVVSTHQNQQT

SEQ ID NO: 508 - protein, 14 aa, synthetic construct
GSAQVSMVGQNQQT

SEQ ID NO: 509 - protein, 14 aa, synthetic construct
GSSTLVTIGKNQQT

SEQ ID NO: 510 - protein, 14 aa, synthetic construct
GFAHQASSGQNQQT

SEQ ID NO: 511 - protein, 14 aa, synthetic construct
GSGQPVLSISNQQT

SEQ ID NO: 512 - protein, 14 aa, synthetic construct
GSGQSHRSELNQQT

SEQ ID NO: 513 - protein, 14 aa, synthetic construct
GSSVGSPIGQNQQT

SEQ ID NO: 514 - protein, 14 aa, synthetic construct
GSGMPIRNVQNQQT

SEQ ID NO: 515 - protein, 14 aa, synthetic construct
GSSTRVDSGQNQQT

SEQ ID NO: 516 - protein, 14 aa, synthetic construct
GSGQNQQTAMRSTT

SEQ ID NO: 517 - protein, 14 aa, synthetic construct
GSGQNQQHSSSHLT

SEQ ID NO: 518 - protein, 14 aa, synthetic construct
GSRNGHAVGQNQQT

SEQ ID NO: 519 - protein, 14 aa, synthetic construct
GLGAYQSSGQNQQT

SEQ ID NO: 520 - protein, 14 aa, synthetic construct
GPGLSGHSGQNQQT

SEQ ID NO: 521 - protein, 14 aa, synthetic construct
GSTGIVSSGQNQQT

SEQ ID NO: 522 - protein, 14 aa, synthetic construct
GSRTTQVIGQNQQT

SEQ ID NO: 523 - protein, 14 aa, synthetic construct
GSGLLHRAQQNQQT

SEQ ID NO: 524 - protein, 14 aa, synthetic construct
GSGQNAQQAAAQQT

SEQ ID NO: 525 - protein, 14 aa, synthetic construct
GSGQNQQSALRTQT

SEQ ID NO: 526 - protein, 14 aa, synthetic construct
GSGFLSDTRQNQQT

SEQ ID NO: 527 - protein, 14 aa, synthetic construct
GSGLLYHDQQNQQT

SEQ ID NO: 528 - protein, 14 aa, synthetic construct
GSGQNQHYSLHKQT

SEQ ID NO: 529 - protein, 14 aa, synthetic construct
GSGHSPLPQQNQQT

SEQ ID NO: 530 - protein, 14 aa, synthetic construct
GNGHSMRPNQNQQT

SEQ ID NO: 531 - protein, 14 aa, synthetic construct
GSGLKWSTLQNQQT

SEQ ID NO: 532 - protein, 14 aa, synthetic construct
GSGQMGRQAVNQQT

SEQ ID NO: 533 - protein, 14 aa, synthetic construct
GSGQNQQTSGVLTL

SEQ ID NO: 534 - protein, 14 aa, synthetic construct
GSGQNQQALHNPHT

SEQ ID NO: 535 - protein, 14 aa, synthetic construct
GSGQNQQVIPNSKT

SEQ ID NO: 536 - protein, 14 aa, synthetic construct
GSPLQDRVGQNQQT

SEQ ID NO: 537 - protein, 14 aa, synthetic construct
GSGQNQYSSTNPQT

SEQ ID NO: 538 - protein, 14 aa, synthetic construct
GAMTVTISGQNQQT

SEQ ID NO: 539 - protein, 14 aa, synthetic construct
GSGQNQQLQTLIRT

SEQ ID NO: 540 - protein, 14 aa, synthetic construct
GSGLRQTSQQNQQT

SEQ ID NO: 541 - protein, 14 aa, synthetic construct
GSGQNQQTGLRQQT

SEQ ID NO: 542 - protein, 14 aa, synthetic construct
GSGQTRQMKDNQQT

SEQ ID NO: 543 - protein, 14 aa, synthetic construct
GSGQNHGLQSGQQT

SEQ ID NO: 544 - protein, 14 aa, synthetic construct
GSGQSHRQPENQQT

SEQ ID NO: 545 - protein, 14 aa, synthetic construct
GSGQDRHIVQNQQT

SEQ ID NO: 546 - protein, 14 aa, synthetic construct
GSGQNQQLPHSNLT

SEQ ID NO: 547 - protein, 14 aa, synthetic construct
GSGQLSVPYDNQQT

SEQ ID NO: 548 - protein, 14 aa, synthetic construct
GSGRNPQTQPLQQT

SEQ ID NO: 549 - protein, 14 aa, synthetic construct
GSGQPYSTGLNQQT

SEQ ID NO: 550 - protein, 14 aa, synthetic construct
GSGQNQQTHGGLRD

SEQ ID NO: 551 - protein, 14 aa, synthetic construct
GAYGMVSSGQNQQT

SEQ ID NO: 552 - protein, 14 aa, synthetic construct
GSGIQSSYSQNQQT

SEQ ID NO: 553 - protein, 14 aa, synthetic construct
GPRLSDQSGQNQQT

SEQ ID NO: 554 - protein, 14 aa, synthetic construct
GSGQNQQTHPSPCT

SEQ ID NO: 555 - protein, 14 aa, synthetic construct
GSGQSFQMHTNQQT

SEQ ID NO: 556 - protein, 14 aa, synthetic construct
GSGQNQQTGNPKHT

SEQ ID NO: 557 - protein, 14 aa, synthetic construct
GFSSAVHSGQNQQT

SEQ ID NO: 558 - protein, 14 aa, synthetic construct
GSGQNQQTSMSNAT

SEQ ID NO: 559 - protein, 14 aa, synthetic construct
GSGQDMKQHHNQQT

SEQ ID NO: 560 - protein, 14 aa, synthetic construct
GLRLSTPSGQNQQT

SEQ ID NO: 561 - protein, 14 aa, synthetic construct
GSGQNQQTSVYMNT

SEQ ID NO: 562 - protein, 14 aa, synthetic construct
GSGQNQYSQSSMQT

SEQ ID NO: 563 - protein, 14 aa, synthetic construct
GSGQNQQSMADHTT

SEQ ID NO: 564 - protein, 14 aa, synthetic construct
GWERSFVSGQNQQT

SEQ ID NO: 565 - protein, 14 aa, synthetic construct
GLLAGKSSGQNQQT

SEQ ID NO: 566 - protein, 14 aa, synthetic construct
GKSFVPQSGQNQQT

SEQ ID NO: 567 - protein, 14 aa, synthetic construct
GSGQMQSAGSNQQT

SEQ ID NO: 568 - protein, 14 aa, synthetic construct
GSDQNQRLTSSMQT

SEQ ID NO: 569 - protein, 14 aa, synthetic construct
GESRAVLSGQNQQT

SEQ ID NO: 570 - protein, 14 aa, synthetic construct
GSVFGVPSGQNQQT

SEQ ID NO: 571 - protein, 14 aa, synthetic construct
GSGLPDRNLQNQQT

SEQ ID NO: 572 - protein, 14 aa, synthetic construct
GSGTHNSAIQNQQT

SEQ ID NO: 573 - protein, 14 aa, synthetic construct
GSGMIIASMQNQQT

SEQ ID NO: 574 - protein, 14 aa, synthetic construct
GGITWTDSGQNQQT

SEQ ID NO: 575 - protein, 14 aa, synthetic construct
GSGQNQQASGRQQT

SEQ ID NO: 576 - protein, 14 aa, synthetic construct
GSGQNQQPHLKSLT

SEQ ID NO: 577 - protein, 14 aa, synthetic construct
GPPQHMTSGQNQQT

SEQ ID NO: 578 - protein, 14 aa, synthetic construct
GSGQNQQASLPSRT

SEQ ID NO: 579 - protein, 14 aa, synthetic construct
GSGQIVSTQTNQQT

SEQ ID NO: 580 - protein, 14 aa, synthetic construct
GSGKGHSAGQNQQT

SEQ ID NO: 581 - protein, 14 aa, synthetic construct
GSGQNTRLQLGQQT

SEQ ID NO: 582 - protein, 14 aa, synthetic construct
GSVGSRPVGQNQQT

SEQ ID NO: 583 - protein, 14 aa, synthetic construct
GSSHTLALGQNQQT

SEQ ID NO: 584 - protein, 14 aa, synthetic construct
GMYEYSQSGQNQQT

SEQ ID NO: 585 - protein, 14 aa, synthetic construct
GNGQNQQHSILHGT

SEQ ID NO: 586 - protein, 14 aa, synthetic construct
GSGYNQPHLQNQQT

SEQ ID NO: 587 - protein, 14 aa, synthetic construct
GPLVNASSGQNQQT

SEQ ID NO: 588 - protein, 14 aa, synthetic construct
GSGQNQQVLTTART

SEQ ID NO: 589 - protein, 14 aa, synthetic construct
GSGQNQHSVHNDQT

SEQ ID NO: 590 - protein, 14 aa, synthetic construct
GAGLIMHSGQNQQT

SEQ ID NO: 591 - protein, 14 aa, synthetic construct
GMGRHSASGQNQQT

SEQ ID NO: 592 - protein, 14 aa, synthetic construct
GSHSQSGHGQNQQT

SEQ ID NO: 593 - protein, 14 aa, synthetic construct
GSSTTIVSGQNHQT

SEQ ID NO: 594 - protein, 14 aa, synthetic construct
GRHLVTASGQNQQT

SEQ ID NO: 595 - protein, 14 aa, synthetic construct
GSGQNQQHANLNQT

SEQ ID NO: 596 - protein, 14 aa, synthetic construct
GSGSTHSKAQNQQT

SEQ ID NO: 597 - protein, 14 aa, synthetic construct
GSGQNKQMLSGNTT

SEQ ID NO: 598 - protein, 14 aa, synthetic construct
GSGQVHNPTQNQQT

SEQ ID NO: 599 - protein, 14 aa, synthetic construct
GSGQNQQIPHVHQT

SEQ ID NO: 600 - protein, 14 aa, synthetic construct
GSLHAGLSGQNQQT

SEQ ID NO: 601 - protein, 14 aa, synthetic construct
GPAQHGTSGQNQQT

SEQ ID NO: 602 - protein, 14 aa, synthetic construct
GEKAVTSSGQNQQT

SEQ ID NO: 603 - protein, 14 aa, synthetic construct
GSGQNQQTMANGQR

SEQ ID NO: 604 - protein, 14 aa, synthetic construct
GSGSPHSKDQNQQT

SEQ ID NO: 605 - protein, 14 aa, synthetic construct
GSFSMGYGGQNQQT

SEQ ID NO: 606 - protein, 14 aa, synthetic construct
GSGTHLVSLQNQQT

SEQ ID NO: 607 - protein, 14 aa, synthetic construct
GSGQMQPHVQNQQT

SEQ ID NO: 608 - protein, 14 aa, synthetic construct
GSGQNQQVAGLNNT

SEQ ID NO: 609 - protein, 14 aa, synthetic construct
GSSQNQQHDMRLRT

SEQ ID NO: 610 - protein, 14 aa, synthetic construct
GPASLPISGQNQQT

SEQ ID NO: 611 - protein, 14 aa, synthetic construct
GSGQNQQPPLATRT

SEQ ID NO: 612 - protein, 14 aa, synthetic construct
GSSRVPVSGQNQQT

SEQ ID NO: 613 - protein, 14 aa, synthetic construct
GSGQNQQTNLGHTT

SEQ ID NO: 614 - protein, 14 aa, synthetic construct
GSGQNQQLVSRVQT

SEQ ID NO: 615 - protein, 14 aa, synthetic construct
GPNSYPVSGQKQQT

SEQ ID NO: 616 - protein, 14 aa, synthetic construct
GHAHYQASGQNQQT

SEQ ID NO: 617 - protein, 14 aa, synthetic construct
GSGQALLSTGNQQT

SEQ ID NO: 618 - protein, 14 aa, synthetic construct
GSGQLPRQMTNQQT

SEQ ID NO: 619 - protein, 14 aa, synthetic construct
GSGFPKSTEQNQQT

SEQ ID NO: 620 - protein, 14 aa, synthetic construct
GSRETSLSGQNQQT

SEQ ID NO: 621 - protein, 14 aa, synthetic construct
GSGQNQQGTGVSHT

SEQ ID NO: 622 - protein, 14 aa, synthetic construct
GSRTVPVYGQNQQT

SEQ ID NO: 623 - protein, 14 aa, synthetic construct
GSNAQSAHGQNQQT

SEQ ID NO: 624 - protein, 14 aa, synthetic construct
GAFHLAASGQNQQT

SEQ ID NO: 625 - protein, 14 aa, synthetic construct
GSGQYRSSSDNQQT

SEQ ID NO: 626 - protein, 14 aa, synthetic construct
GSGQVYISTPNQQT

SEQ ID NO: 627 - protein, 14 aa, synthetic construct
GSGVSTQLLQNQQT

SEQ ID NO: 628 - protein, 14 aa, synthetic construct
GSGQLGLSVTNQQT

SEQ ID NO: 629 - protein, 14 aa, synthetic construct
GSGSNMRLSQNQQT

SEQ ID NO: 630 - protein, 14 aa, synthetic construct
GSGQNLHSGLPQQT

SEQ ID NO: 631 - protein, 14 aa, synthetic construct
GSSHTLALGQNKQT

SEQ ID NO: 632 - protein, 14 aa, synthetic construct
GSGQNQHSLPAHRT

SEQ ID NO: 633 - protein, 14 aa, synthetic construct
GSGQNQGTVYPNQT

SEQ ID NO: 634 - protein, 14 aa, synthetic construct
GSGQNQQPSLRQST

SEQ ID NO: 635 - protein, 14 aa, synthetic construct
GSGQNARLKDNQQT

SEQ ID NO: 636 - protein, 14 aa, synthetic construct
GHAGSTGSGQNQQT

SEQ ID NO: 637 - protein, 14 aa, synthetic construct
GSGQALSSSGNQQT

SEQ ID NO: 638 - protein, 14 aa, synthetic construct
GSGASESHRQNQQT

SEQ ID NO: 639 - protein, 14 aa, synthetic construct
GVGVITSSGQNQQT

SEQ ID NO: 640 - protein, 14 aa, synthetic construct
GSLYGQSLGQNQQT

SEQ ID NO: 641 - protein, 14 aa, synthetic construct
GSGQMSDVHGNQQT

SEQ ID NO: 642 - protein, 14 aa, synthetic construct
GSGQNQQHSSKATT

SEQ ID NO: 643 - protein, 14 aa, synthetic construct
GSGQNQQTSVSQQT

SEQ ID NO: 644 - protein, 14 aa, synthetic construct
GSGQKMWKLDNQQT

SEQ ID NO: 645 - protein, 14 aa, synthetic construct
GSGQNVSMQVNQQT

SEQ ID NO: 646 - protein, 14 aa, synthetic construct
GSGQNQRATLSNQT

SEQ ID NO: 647 - protein, 14 aa, synthetic construct
GSGQASSKSANQQT

SEQ ID NO: 648 - protein, 14 aa, synthetic construct
GSGKNQTPIPKGQT

SEQ ID NO: 649 - protein, 14 aa, synthetic construct
GSGQNQQTRQEGST

SEQ ID NO: 650 - protein, 14 aa, synthetic construct
GASSLATSGQNQQT

SEQ ID NO: 651 - protein, 14 aa, synthetic construct
GSGQRGSLTENQQT

SEQ ID NO: 652 - protein, 14 aa, synthetic construct
GSEQTRQRGQNQQT

SEQ ID NO: 653 - protein, 14 aa, synthetic construct
GSGQNQQTLTASKE

SEQ ID NO: 654 - protein, 14 aa, synthetic construct
GSGTSGKTGKNQQT

SEQ ID NO: 655 - protein, 14 aa, synthetic construct
GQLVTFTSGQNQQT

SEQ ID NO: 656 - protein, 14 aa, synthetic construct
GSGQNQQSANKILT

SEQ ID NO: 657 - protein, 14 aa, synthetic construct
GSGQNQQHHSSHTT

SEQ ID NO: 658 - protein, 14 aa, synthetic construct
GSGQNQKGMQPNQT

SEQ ID NO: 659 - protein, 14 aa, synthetic construct
GSGQLVSGLYNQQT

SEQ ID NO: 660 - protein, 14 aa, synthetic construct
GSSVGVPSGQNQQT

SEQ ID NO: 661 - protein, 14 aa, synthetic construct
GSGQNQQWDSRRQT

SEQ ID NO: 662 - protein, 14 aa, synthetic construct
GSEQTRQSGQNQQT

SEQ ID NO: 663 - protein, 14 aa, synthetic construct
GSGIGSHIPQNQQT

SEQ ID NO: 664 - protein, 14 aa, synthetic construct
GSGQNQRLHGVDQT

SEQ ID NO: 665 - protein, 14 aa, synthetic construct
GEVSRVLSGQNQQT

SEQ ID NO: 666 - protein, 14 aa, synthetic construct
GSGQNQQKVSPLLT

SEQ ID NO: 667 - protein, 14 aa, synthetic construct
GSGLALERSQNQQT

SEQ ID NO: 668 - protein, 14 aa, synthetic construct
GPDRIGSSGQNQQT

SEQ ID NO: 669 - protein, 14 aa, synthetic construct
GSGQNQDHQNKQQT

SEQ ID NO: 670 - protein, 14 aa, synthetic construct
GSGQNQQTALYNNT

SEQ ID NO: 671 - protein, 14 aa, synthetic construct
GSGAVHLTAQNQQT

SEQ ID NO: 672 - protein, 14 aa, synthetic construct
GSLVSTQSGQNQQT

SEQ ID NO: 673 - protein, 14 aa, synthetic construct
GSGVSARMVQNQQT

SEQ ID NO: 674 - protein, 14 aa, synthetic construct
GSGQTRMPLANQQT

SEQ ID NO: 675 - protein, 14 aa, synthetic construct
GSGISSRNMQNQQT

SEQ ID NO: 676 - protein, 14 aa, synthetic construct
GSGEKVHSGQNQQT

SEQ ID NO: 677 - protein, 14 aa, synthetic construct
GSGQNQQKLSSMST

SEQ ID NO: 678 - protein, 14 aa, synthetic construct
GSGQNQQTGQHMRV

SEQ ID NO: 679 - protein, 14 aa, synthetic construct
GSGMIHTTAQNQQT

SEQ ID NO: 680 - protein, 14 aa, synthetic construct
GSGQNWPALKGQQT

SEQ ID NO: 681 - protein, 14 aa, synthetic construct
GASHMSISGQNQQT

SEQ ID NO: 682 - protein, 14 aa, synthetic construct
GSDQNQQLGYSKQT

SEQ ID NO: 683 - protein, 14 aa, synthetic construct
GIPSIRESGQNQQT

SEQ ID NO: 684 - protein, 14 aa, synthetic construct
GSGIPSVKFQNQQT

SEQ ID NO: 685 - protein, 14 aa, synthetic construct
GSGQNQQTSVSQNV

SEQ ID NO: 686 - protein, 14 aa, synthetic construct
GSGQNQQIGESRMT

SEQ ID NO: 687 - protein, 14 aa, synthetic construct
GSGSSSMSFQNQQT

SEQ ID NO: 688 - protein, 14 aa, synthetic construct
GSGQKQERAVSKQT

SEQ ID NO: 689 - protein, 14 aa, synthetic construct
GCTTRLNSGQNQQT

SEQ ID NO: 690 - protein, 14 aa, synthetic construct
GSGQNQQIISTKIT

SEQ ID NO: 691 - protein, 14 aa, synthetic construct
GSGQNQQKSLNGNT

SEQ ID NO: 692 - protein, 14 aa, synthetic construct
GSGIPAPRLQNQQT

SEQ ID NO: 693 - protein, 14 aa, synthetic construct
GSGQIRESMGNQQT

SEQ ID NO: 694 - protein, 14 aa, synthetic construct
GSGQNSGVHFNQQT

SEQ ID NO: 695 - protein, 14 aa, synthetic construct
GSGQNIGHSLPQQT

SEQ ID NO: 696 - protein, 14 aa, synthetic construct
GSGERSISVQNQQT

SEQ ID NO: 697 - protein, 14 aa, synthetic construct
GSGLKPNVLQNQQT

SEQ ID NO: 698 - protein, 14 aa, synthetic construct
GSGQVAYAQGNQQT

SEQ ID NO: 699 - protein, 14 aa, synthetic construct
GSGQSSYGSGNQQT

SEQ ID NO: 700 - protein, 14 aa, synthetic construct
GSGQNQAMTHGDQT

SEQ ID NO: 701 - protein, 14 aa, synthetic construct
GSGQNQALVSMGQT

SEQ ID NO: 702 - protein, 14 aa, synthetic construct
GSGQNPSFMRGQQT

SEQ ID NO: 703 - protein, 14 aa, synthetic construct
GSGQNQQSHLRTNT

SEQ ID NO: 704 - protein, 14 aa, synthetic construct
GYTRLETSGQNQQT

SEQ ID NO: 705 - protein, 14 aa, synthetic construct
GSGQSYDMRGNQQT

SEQ ID NO: 706 - protein, 14 aa, synthetic construct
GSRTTQDIGQNQQT

SEQ ID NO: 707 - protein, 14 aa, synthetic construct
GSGHPYKAAQNQQT

SEQ ID NO: 708 - protein, 14 aa, synthetic construct
GRLSNAHGGQNQQT

SEQ ID NO: 709 - protein, 14 aa, synthetic construct
GSGQNQRAVLNDQT

SEQ ID NO: 710 - protein, 14 aa, synthetic construct
GGSHTYGGGQNQQT

SEQ ID NO: 711 - protein, 14 aa, synthetic construct
GSSVNSMIGQNQQT

SEQ ID NO: 712 - protein, 14 aa, synthetic construct
GNSSMMGSGQNQQT

SEQ ID NO: 713 - protein, 14 aa, synthetic construct
GNRDRPSSGQNQQT

SEQ ID NO: 714 - protein, 14 aa, synthetic construct
GSGNMHASRQNQQT

SEQ ID NO: 715 - protein, 14 aa, synthetic construct
GFIFPKVSGQNQQT

SEQ ID NO: 716 - protein, 14 aa, synthetic construct
GSGQNQQLKNSTST

SEQ ID NO: 717 - protein, 14 aa, synthetic construct
GSGQNQQSQYMPRT

SEQ ID NO: 718 - protein, 14 aa, synthetic construct
GSGQRMADIGNQQT

SEQ ID NO: 719 - protein, 14 aa, synthetic construct
GSGQNQSHYPSQQT

SEQ ID NO: 720 - protein, 14 aa, synthetic construct
GSDGKMHRGQNQQT

SEQ ID NO: 721 - protein, 14 aa, synthetic construct
GSGSVGFIGQNQQT

SEQ ID NO: 722 - protein, 14 aa, synthetic construct
GLHGMTLSGQNQQT

SEQ ID NO: 723 - protein, 14 aa, synthetic construct
GSDQSKRGDSNQQT

SEQ ID NO: 724 - protein, 14 aa, synthetic construct
GSLFLATGGQNQQT

SEQ ID NO: 725 - protein, 14 aa, synthetic construct
GSGQNQQPSAFSKT

SEQ ID NO: 726 - protein, 14 aa, synthetic construct
GSGQLPQSGLNQQT

SEQ ID NO: 727 - protein, 14 aa, synthetic construct
GSGSKQNALQNQQT

SEQ ID NO: 728 - protein, 14 aa, synthetic construct
GSGQRRELSQNQQT

SEQ ID NO: 729 - protein, 14 aa, synthetic construct
GSGQREPKASNQQT

SEQ ID NO: 730 - protein, 14 aa, synthetic construct
GSGQNQQHPSTQQT

SEQ ID NO: 731 - protein, 14 aa, synthetic construct
GSQSTLGLGQNQQT

SEQ ID NO: 732 - protein, 14 aa, synthetic construct
GSGQNQQMPGLSST

SEQ ID NO: 733 - protein, 14 aa, synthetic construct
GSGQNQQTVGGKNL

SEQ ID NO: 734 - protein, 14 aa, synthetic construct
GSSREFHSGQNQQT

SEQ ID NO: 735 - protein, 14 aa, synthetic construct
GSGQNQQTVPSNLV

SEQ ID NO: 736 - protein, 14 aa, synthetic construct
GSGQNAYSSQAQQT

SEQ ID NO: 737 - protein, 14 aa, synthetic construct
GSGQNKDHSTRRQT

SEQ ID NO: 738 - protein, 14 aa, synthetic construct
GQLGSVGSGQDQQT

SEQ ID NO: 739 - protein, 14 aa, synthetic construct
GSGQHAAPGHNQQT

SEQ ID NO: 740 - protein, 14 aa, synthetic construct
GSGQNQQTSQSPPT

SEQ ID NO: 741 - protein, 14 aa, synthetic construct
GSGNYRDHEQNQQT

SEQ ID NO: 742 - protein, 14 aa, synthetic construct
GSGQHSNQHVNQQT

SEQ ID NO: 743 - protein, 14 aa, synthetic construct
GSGQTARNGINQQT

SEQ ID NO: 744 - protein, 14 aa, synthetic construct
GSGQNQQHYGSQGT

SEQ ID NO: 745 - protein, 14 aa, synthetic construct
GSGSPQASRQNQQT

SEQ ID NO: 746 - protein, 14 aa, synthetic construct
GSGFSHSMGKNQQT

SEQ ID NO: 747 - protein, 14 aa, synthetic construct
GSGQSHSLETNQQT

SEQ ID NO: 748 - protein, 14 aa, synthetic construct
GTEQTRQSGQNQQT

SEQ ID NO: 749 - protein, 14 aa, synthetic construct
GSGRHLASVQNQQT

SEQ ID NO: 750 - protein, 14 aa, synthetic construct
GLGSKNHSGQNQQT

SEQ ID NO: 751 - protein, 14 aa, synthetic construct
GSGQNQQTSHFPSA

SEQ ID NO: 752 - protein, 14 aa, synthetic construct
GSGQLSGTPQNQQT

SEQ ID NO: 753 - protein, 14 aa, synthetic construct
GSGQNQQAPHKKET

SEQ ID NO: 754 - protein, 14 aa, synthetic construct
GSGQNQQTLRGSLE

SEQ ID NO: 755 - protein, 14 aa, synthetic construct
GSIAMTSHGQNQQT

SEQ ID NO: 756 - protein, 14 aa, synthetic construct
GSPGVSPSGQNQQT

SEQ ID NO: 757 - protein, 14 aa, synthetic construct
GSGQNQQTGSSSRV

SEQ ID NO: 758 - protein, 14 aa, synthetic construct
GSGQHLPLLGNQQT

SEQ ID NO: 759 - protein, 14 aa, synthetic construct
GSDHSHRGGQNQQT

SEQ ID NO: 760 - protein, 14 aa, synthetic construct
GSGIVTKLGQNQQT

SEQ ID NO: 761 - protein, 14 aa, synthetic construct
GSGQDVTKTGNQQT

SEQ ID NO: 762 - protein, 14 aa, synthetic construct
GSGQNQQSHGRIGT

SEQ ID NO: 763 - protein, 14 aa, synthetic construct
GSGQNQQINHRSPT

SEQ ID NO: 764 - protein, 14 aa, synthetic construct
GSGDDSRVGQNQQT

SEQ ID NO: 765 - protein, 14 aa, synthetic construct
GSGQSTLKRINQQT

SEQ ID NO: 766 - protein, 14 aa, synthetic construct
GSGSQHSKAQNQQT

SEQ ID NO: 767 - protein, 14 aa, synthetic construct
GSGQNQQHASSNNT

SEQ ID NO: 768 - protein, 14 aa, synthetic construct
GSRTYQVSGQNQQT

SEQ ID NO: 769 - protein, 14 aa, synthetic construct
GSGQNQGLLSSPQT

SEQ ID NO: 770 - protein, 14 aa, synthetic construct
GSGGGLQHNQNQQT

SEQ ID NO: 771 - protein, 14 aa, synthetic construct
GSGQNQQTTAATRM

SEQ ID NO: 772 - protein, 14 aa, synthetic construct
GSGQNQRASILVQT

SEQ ID NO: 773 - protein, 14 aa, synthetic construct
GSGQNLGLLGAQQT

SEQ ID NO: 774 - protein, 14 aa, synthetic construct
GSLDLGRSGQNQQT

SEQ ID NO: 775 - protein, 14 aa, synthetic construct
GNSQVKVSGQNQQT

SEQ ID NO: 776 - protein, 14 aa, synthetic construct
GSSGSHQYGQNQQT

SEQ ID NO: 777 - protein, 14 aa, synthetic construct
GSGQNQQQRDGTLT

SEQ ID NO: 778 - protein, 14 aa, synthetic construct
GRGQHVSVANNQQT

SEQ ID NO: 779 - protein, 14 aa, synthetic construct
GDSSSRISGQNQQT

SEQ ID NO: 780 - protein, 14 aa, synthetic construct
GSGQNQQHSLSSQT

SEQ ID NO: 781 - protein, 14 aa, synthetic construct
GSLMDVHRGQNQQT

SEQ ID NO: 782 - protein, 14 aa, synthetic construct
GSIQYQSSGQNQQT

SEQ ID NO: 783 - protein, 14 aa, synthetic construct
GLGSKNPSGQNQQT

SEQ ID NO: 784 - protein, 14 aa, synthetic construct
GSGQLVLTLQNQQT

SEQ ID NO: 785 - protein, 14 aa, synthetic construct
GSGQNQQTSQPLPG

SEQ ID NO: 786 - protein, 14 aa, synthetic construct
GSGQNQQNLGKLNT

SEQ ID NO: 787 - protein, 14 aa, synthetic construct
GTTAHQPSGQNQQT

SEQ ID NO: 788 - protein, 14 aa, synthetic construct
GSGQNRAQIGTQQT

SEQ ID NO: 789 - protein, 14 aa, synthetic construct
GSGQYVHVSSNQQT

SEQ ID NO: 790 - protein, 14 aa, synthetic construct
GSGQNQQTAHAFNI

SEQ ID NO: 791 - protein, 14 aa, synthetic construct
GSGQNQRTMVATQT

SEQ ID NO: 792 - protein, 14 aa, synthetic construct
GSGQNPIRGAMQQT

SEQ ID NO: 793 - protein, 14 aa, synthetic construct
GSGYVITGSQNQQT

SEQ ID NO: 794 - protein, 14 aa, synthetic construct
GRGPKQSNIQNQQT

SEQ ID NO: 795 - protein, 14 aa, synthetic construct
GSGQNQQTMLGKPC

SEQ ID NO: 796 - protein, 14 aa, synthetic construct
GSGQNQQVGSTVRT

SEQ ID NO: 797 - protein, 14 aa, synthetic construct
GNVTTQKSGQNQQT

SEQ ID NO: 798 - protein, 14 aa, synthetic construct
GSGNPVSHLQNQQT

SEQ ID NO: 799 - protein, 14 aa, synthetic construct
GSLSHMESGQNQQT

SEQ ID NO: 800 - protein, 14 aa, synthetic construct
GRAPTNLSGQNQQT

SEQ ID NO: 801 - protein, 14 aa, synthetic construct
GSGQNQQTVMTARA

SEQ ID NO: 802 - protein, 14 aa, synthetic construct
GSGMPASRLQNQQT

SEQ ID NO: 803 - protein, 14 aa, synthetic construct
GVVRNHQSGQNQQT

SEQ ID NO: 804 - protein, 14 aa, synthetic construct
GSGQNQHSVQVRQT

SEQ ID NO: 805 - protein, 14 aa, synthetic construct
GSGQNTGHLTMQQT

SEQ ID NO: 806 - protein, 14 aa, synthetic construct
GSGQNQQYAGKILT

SEQ ID NO: 807 - protein, 14 aa, synthetic construct
GSGNPHVRNQNQQT

SEQ ID NO: 808 - protein, 14 aa, synthetic construct
GSGQNGGSSNRQQT

SEQ ID NO: 809 - protein, 14 aa, synthetic construct
GSGQRLSQGVNHQT

SEQ ID NO: 810 - protein, 14 aa, synthetic construct
GSGQNAHAKEGQQT

SEQ ID NO: 811 - protein, 14 aa, synthetic construct
GSSPAPNSGQNQQT

SEQ ID NO: 812 - protein, 14 aa, synthetic construct
GLAHKTSSGQNQQT

SEQ ID NO: 813 - protein, 14 aa, synthetic construct
GSGQNQQTPGAHKT

SEQ ID NO: 814 - protein, 14 aa, synthetic construct
GSGQNQQSLSGSFT

SEQ ID NO: 815 - protein, 14 aa, synthetic construct
GSGQNQQSTGTSRT

SEQ ID NO: 816 - protein, 14 aa, synthetic construct
GSGQNQQTVQSNLV

SEQ ID NO: 817 - protein, 14 aa, synthetic construct
GSGQNQQLGSRQCT

SEQ ID NO: 818 - protein, 14 aa, synthetic construct
GSGQNQYLRLELQT

SEQ ID NO: 819 - protein, 14 aa, synthetic construct
GSGQNQQTSPRLQT

SEQ ID NO: 820 - protein, 14 aa, synthetic construct
GSGQNQQTTSSNMT

SEQ ID NO: 821 - protein, 14 aa, synthetic construct
GTASTYNSGQNQQT

SEQ ID NO: 822 - protein, 14 aa, synthetic construct
GSGQNQQTMPQHKI

SEQ ID NO: 823 - protein, 14 aa, synthetic construct
GSGQSHLHTGNQQT

SEQ ID NO: 824 - protein, 14 aa, synthetic construct
GVKGVGHSGQNQQT

SEQ ID NO: 825 - protein, 14 aa, synthetic construct
GSGKVTKQSQNQQT

SEQ ID NO: 826 - protein, 14 aa, synthetic construct
GSGQNQQTALEKSL

SEQ ID NO: 827 - protein, 14 aa, synthetic construct
GSGYKDTYGQNQQT

SEQ ID NO: 828 - protein, 14 aa, synthetic construct
GSGQNQQSGTFLST

SEQ ID NO: 829 - protein, 14 aa, synthetic construct
GSGQNTGQHMMQQT

SEQ ID NO: 830 - protein, 14 aa, synthetic construct
GSGKNQQRPGLDQT

SEQ ID NO: 831 - protein, 14 aa, synthetic construct
GSGQSREISLNQQT

SEQ ID NO: 832 - protein, 14 aa, synthetic construct
GTPTSPSSGQNQQT

SEQ ID NO: 833 - protein, 14 aa, synthetic construct
GKPAGGLSGQNQQT

SEQ ID NO: 834 - protein, 14 aa, synthetic construct
GSGQNHRSADMQQT

SEQ ID NO: 835 - protein, 14 aa, synthetic construct
GSGQNQQTLPSLSL

SEQ ID NO: 836 - protein, 14 aa, synthetic construct
GSPYMGATGQNQQT

SEQ ID NO: 837 - protein, 14 aa, synthetic construct
GSGHAKAVGQNQQT

SEQ ID NO: 838 - protein, 14 aa, synthetic construct
GHMKGVTSGQNQQT

SEQ ID NO: 839 - protein, 14 aa, synthetic construct
GSGQNQKILTLDQT

SEQ ID NO: 840 - protein, 14 aa, synthetic construct
GSGQNQQTKVGHSA

SEQ ID NO: 841 - protein, 14 aa, synthetic construct
GIARTTISGQNQQT

SEQ ID NO: 842 - protein, 14 aa, synthetic construct
GSGQNQQTSVGFRT

SEQ ID NO: 843 - protein, 14 aa, synthetic construct
GSGQNQQTMIANIR

SEQ ID NO: 844 - protein, 14 aa, synthetic construct
GDMTRSSSGQNQQT

SEQ ID NO: 845 - protein, 14 aa, synthetic construct
GSGHMSDLRQNQQT

SEQ ID NO: 846 - protein, 14 aa, synthetic construct
GRGAVMASGQNQQT

SEQ ID NO: 847 - protein, 14 aa, synthetic construct
GSGQNQQLSGKSVT

SEQ ID NO: 848 - protein, 14 aa, synthetic construct
GSHTLVVSGQNQQT

SEQ ID NO: 849 - protein, 14 aa, synthetic construct
GSGPWSAGLQNQQT

SEQ ID NO: 850 - protein, 14 aa, synthetic construct
GSGQHSPHALNQQT

SEQ ID NO: 851 - protein, 14 aa, synthetic construct
GSGQNQQPNSGSMT

SEQ ID NO: 852 - protein, 14 aa, synthetic construct
GSGLAHLGGQNQQT

SEQ ID NO: 853 - protein, 14 aa, synthetic construct
GSSVRYEPKQNQQT

SEQ ID NO: 854 - protein, 14 aa, synthetic construct
GSGQNQQARPLELT

SEQ ID NO: 855 - protein, 14 aa, synthetic construct
GSGQPRSTGINQQT

SEQ ID NO: 856 - protein, 14 aa, synthetic construct
GSGQNQANWVKVQT

SEQ ID NO: 857 - protein, 14 aa, synthetic construct
GSGHLFQSGQNQQT

SEQ ID NO: 858 - protein, 14 aa, synthetic construct
GSGQNRGISISQQT

SEQ ID NO: 859 - protein, 14 aa, synthetic construct
GSGTHYDNRQNQQT

SEQ ID NO: 860 - protein, 14 aa, synthetic construct
GSGQNQQTSTTPLP

SEQ ID NO: 861 - protein, 14 aa, synthetic construct
GSGQVHASQVNQKT

SEQ ID NO: 862 - protein, 14 aa, synthetic construct
GSSGHRESGQNQQT

SEQ ID NO: 863 - protein, 14 aa, synthetic construct
GLSAEKSSGQNQQT

SEQ ID NO: 864 - protein, 14 aa, synthetic construct
GSGQEHRSLANQQT

SEQ ID NO: 865 - protein, 14 aa, synthetic construct
GSGQTVVRIANQQT

SEQ ID NO: 866 - protein, 14 aa, synthetic construct
GSGQNVSSVHRQQT

SEQ ID NO: 867 - protein, 14 aa, synthetic construct
GSGASRMSIQNQQT

SEQ ID NO: 868 - protein, 14 aa, synthetic construct
GVAFIGSSGQNQQT

SEQ ID NO: 869 - protein, 14 aa, synthetic construct
GSGQNQQTVPTRQT

SEQ ID NO: 870 - protein, 14 aa, synthetic construct
GSGQAAKSSQNQQT

SEQ ID NO: 871 - protein, 14 aa, synthetic construct
GSGQNQQVAIRTST

SEQ ID NO: 872 - protein, 14 aa, synthetic construct
GSVHMQNAGQNQQT

SEQ ID NO: 873 - protein, 14 aa, synthetic construct
GSGMRQAGVQNQQT

SEQ ID NO: 874 - protein, 14 aa, synthetic construct
GSGQNQQVGGKTVT

SEQ ID NO: 875 - protein, 14 aa, synthetic construct
GVHDMRVSGQNQQT

SEQ ID NO: 876 - protein, 14 aa, synthetic construct
GSGQHVSVANNQQT

SEQ ID NO: 877 - protein, 14 aa, synthetic construct
GSAAMSVRGQNQQT

SEQ ID NO: 878 - protein, 14 aa, synthetic construct
GVSRGGPSGQNQQT

SEQ ID NO: 879 - protein, 14 aa, synthetic construct
GSGQMVHTIGNQQT

SEQ ID NO: 880 - protein, 14 aa, synthetic construct
GRGGSMAETQNQQT

SEQ ID NO: 881 - protein, 14 aa, synthetic construct
GSGHTNPTRQNQQT

SEQ ID NO: 882 - protein, 14 aa, synthetic construct
GSGEAARYEQNQQT

SEQ ID NO: 883 - protein, 14 aa, synthetic construct
GSGQNERHLVLQQT

SEQ ID NO: 884 - protein, 14 aa, synthetic construct
GSGQNQQSKQQVLT

SEQ ID NO: 885 - protein, 14 aa, synthetic construct
GSGQARAHRGNQQT

SEQ ID NO: 886 - protein, 14 aa, synthetic construct
GSGQNQQPLDTSRT

SEQ ID NO: 887 - protein, 14 aa, synthetic construct
GSGQNQQLANMVTT

SEQ ID NO: 888 - protein, 14 aa, synthetic construct
GSGQMKDLHRNQQT

SEQ ID NO: 889 - protein, 14 aa, synthetic construct
GSGQNQHLSSFVQT

SEQ ID NO: 890 - protein, 14 aa, synthetic construct
GSGQNQQPSSRVTT

SEQ ID NO: 891 - protein, 14 aa, synthetic construct
GSGQNQQLAITLGT

SEQ ID NO: 892 - protein, 14 aa, synthetic construct
GSGQNQQTVGNPAT

SEQ ID NO: 893 - protein, 14 aa, synthetic construct
GSGQNQGRAHPMQT

SEQ ID NO: 894 - protein, 14 aa, synthetic construct
GSGQLIASVVNQQT

SEQ ID NO: 895 - protein, 14 aa, synthetic construct
GSSVRSLVGQNQQT

SEQ ID NO: 896 - protein, 14 aa, synthetic construct
GGAGSAHSGQNQQT

SEQ ID NO: 897 - protein, 14 aa, synthetic construct
GSDQNQQTMSSTRT

SEQ ID NO: 898 - protein, 14 aa, synthetic construct
GSGQNQQMAGAFRT

SEQ ID NO: 899 - protein, 14 aa, synthetic construct
GSLGNLQRGQNQQT

SEQ ID NO: 900 - protein, 14 aa, synthetic construct
GSGPSISHGQNQQT

SEQ ID NO: 901 - protein, 14 aa, synthetic construct
GSGQNQQSSFNVQT

SEQ ID NO: 902 - protein, 14 aa, synthetic construct
GSGQNQQTGQATHN

SEQ ID NO: 903 - protein, 14 aa, synthetic construct
VSGSPHSKAQNQQT

SEQ ID NO: 904 - protein, 14 aa, synthetic construct
CSGSPHSKAQNQQT

SEQ ID NO: 905 - protein, 14 aa, synthetic construct
GSGSPHRKAQNQQT

SEQ ID NO: 906 - protein, 14 aa, synthetic construct
GRGSPHSKAQNQQT

SEQ ID NO: 907 - protein, 14 aa, synthetic construct
GSGSPHSKAQNKQT

SEQ ID NO: 908 - protein, 14 aa, synthetic construct
GSGSPHSKAQTQQT

SEQ ID NO: 909 - protein, 14 aa, synthetic construct
GSGSTHASRQNQQT

SEQ ID NO: 910 - protein, 14 aa, synthetic construct
GSGSPHKYGQNQQT

SEQ ID NO: 911 - protein, 14 aa, synthetic construct
GSGSPHKFGQNQQT

SEQ ID NO: 912 - protein, 14 aa, synthetic construct
VSGSPHKFGQNQQT

SEQ ID NO: 913 - protein, 14 aa, synthetic construct
GSGSPHSKAQNHQT

SEQ ID NO: 914 - protein, 14 aa, synthetic construct
GSGSPHSKAQHQQT

SEQ ID NO: 915 - protein, 14 aa, synthetic construct
GSGSPHKTYQNQQT

SEQ ID NO: 916 - protein, 14 aa, synthetic construct
VSGSPHASRQNQQT

SEQ ID NO: 917 - protein, 14 aa, synthetic construct
GSGSPHKFGKNQQT

SEQ ID NO: 918 - protein, 14 aa, synthetic construct
GSGSPHASRQNQHT

SEQ ID NO: 919 - protein, 14 aa, synthetic construct
GSHSPHKSGQNQQT

SEQ ID NO: 920 - protein, 14 aa, synthetic construct
GSGQNQQRRMSPST

SEQ ID NO: 921 - protein, 14 aa, synthetic construct
GSGSPHSKPQNQQT

SEQ ID NO: 922 - protein, 14 aa, synthetic construct
GSGSPHKFGQKQQT

SEQ ID NO: 923 - protein, 14 aa, synthetic construct
VSGSPHGARQNQQT

SEQ ID NO: 924 - protein, 14 aa, synthetic construct
GSGSPHSKAQKQQT

SEQ ID NO: 925 - protein, 14 aa, synthetic construct
GSHSPHKRGQNQQT

SEQ ID NO: 926 - protein, 14 aa, synthetic construct
GSGQNRQRLKGLET

SEQ ID NO: 927 - protein, 14 aa, synthetic construct
GSGSPHKLGQNQQT

SEQ ID NO: 928 - protein, 14 aa, synthetic construct
GSGSPHKTSKNQQT

SEQ ID NO: 929 - protein, 14 aa, synthetic construct
GSGSPHKIGQNQQT

SEQ ID NO: 930 - protein, 14 aa, synthetic construct
GSGQDSPHVRNQQT

SEQ ID NO: 931 - protein, 14 aa, synthetic construct
GSGSPHKTSQNQQT

SEQ ID NO: 932 - protein, 14 aa, synthetic construct
GSGSPHASRKNQQT

SEQ ID NO: 933 - protein, 14 aa, synthetic construct
GSHSPHKSGQKQQT

SEQ ID NO: 934 - protein, 14 aa, synthetic construct
GSGSPHKTSQKQQT

SEQ ID NO: 935 - protein, 14 aa, synthetic construct
GSGSPHVRGQNKQT

SEQ ID NO: 936 - protein, 14 aa, synthetic construct
GSGSPHKTTQNQQT

SEQ ID NO: 937 - protein, 14 aa, synthetic construct
GSGPVRALRQNQQT

SEQ ID NO: 938 - protein, 14 aa, synthetic construct
GSGSPHVRGQKQQT

SEQ ID NO: 939 - protein, 14 aa, synthetic construct
CSGSPHKTSQNQQT

SEQ ID NO: 940 - protein, 14 aa, synthetic construct
CSHSPHKSGQNQQT

SEQ ID NO: 941 - protein, 6 aa, synthetic construct
SPHSKA

SEQ ID NO: 942 - DNA, 18 bp, synthetic construct
  source 1..18: mol_type = other DNA
agcccacacagcaaagca

SEQ ID NO: 943 - protein, 8 aa, synthetic construct
HDSPHKSG

SEQ ID NO: 944 - DNA, 24 bp, synthetic construct
  source 1..24: mol_type = other DNA
cacgacagcccacacaaaagcgga

SEQ ID NO: 945 - protein, 6 aa, synthetic construct
SPHSKA

SEQ ID NO: 946 - protein, 6 aa, synthetic construct
SPHKSG

SEQ ID NO: 947 - protein, 6 aa, synthetic construct
SPHARM

SEQ ID NO: 948 - protein, 6 aa, synthetic construct
SPHVKS

SEQ ID NO: 949 - protein, 6 aa, synthetic construct
SPHASR

SEQ ID NO: 950 - protein, 6 aa, synthetic construct
SPHVKI

SEQ ID NO: 951 - protein, 6 aa, synthetic construct
SPHKSR

SEQ ID NO: 952 - protein, 6 aa, synthetic construct
SPHSLR

SEQ ID NO: 953 - protein, 6 aa, synthetic construct
SPHSKW

SEQ ID NO: 954 - protein, 6 aa, synthetic construct
SPHKKN

SEQ ID NO: 955 - protein, 6 aa, synthetic construct
SPHVRM

SEQ ID NO: 956 - protein, 6 aa, synthetic construct
SPHRKA

SEQ ID NO: 957 - protein, 6 aa, synthetic construct
SPHKFG

SEQ ID NO: 958 - protein, 6 aa, synthetic construct
SPHKIG

SEQ ID NO: 959 - protein, 6 aa, synthetic construct
SPHKLG

SEQ ID NO: 960 - protein, 6 aa, synthetic construct
SPHSKL

SEQ ID NO: 961 - protein, 6 aa, synthetic construct
SPHSRG

SEQ ID NO: 962 - protein, 6 aa, synthetic construct
SPHSKS

SEQ ID NO: 963 - protein, 6 aa, synthetic construct
SPHKTS

SEQ ID NO: 964 - protein, 6 aa, synthetic construct
SPHKTT

SEQ ID NO: 965 - protein, 6 aa, synthetic construct
SPHKTY

SEQ ID NO: 966 - protein, 6 aa, synthetic construct
SPHKYG

SEQ ID NO: 967 - protein, 6 aa, synthetic construct
SPHSKD

SEQ ID NO: 968 - protein, 6 aa, synthetic construct
SPHSKP

SEQ ID NO: 969 - protein, 6 aa, synthetic construct
SPHSRA

SEQ ID NO: 970 - protein, 6 aa, synthetic construct
SPHSSR

SEQ ID NO: 971 - protein, 6 aa, synthetic construct
SPHWKA

SEQ ID NO: 972 - protein, 6 aa, synthetic construct
SPHTRG

SEQ ID NO: 973 - protein, 6 aa, synthetic construct
SPHVRG

SEQ ID NO: 974 - protein, 6 aa, synthetic construct
SPHKRG

SEQ ID NO: 975 - protein, 6 aa, synthetic construct
SPHGAR

SEQ ID NO: 976 - protein, 6 aa, synthetic construct
SPHRSG

SEQ ID NO: 977 - protein, 6 aa, synthetic construct
SPHKSA

SEQ ID NO: 978 - protein, 6 aa, synthetic construct
SPHSKR

SEQ ID NO: 979 - protein, 6 aa, synthetic construct
SPHFLR

SEQ ID NO: 980 - protein, 6 aa, synthetic construct
SPHVRR

SEQ ID NO: 981 - protein, 742 aa, synthetic construct
MAADGYLPDWLEDNLSEGIREWWALKPGAPQPKANQQHQDNARGLVLPGYKYLGPGNGLDKGEPVNAADAAALEHDKAYDQQLKAGDNPYLKYNHADAEFQERLKEDTSFGGNLGRAVFQAKKRLLEPLGLVEEAAKTAPGKKRPVEQSPQEPDSSAGIGKSGAQPAKKRLNFGQTGDTESVPDPQPIGEPPAAPSGVGSLTMASGGGAPVADNNEGADGVGSSSGNWHCDSQWLGDRVITTSTRTWALPTYNNHLYKQISNSTSGGSSNDNAYFGYSTPWGYFDFNRFHCHFSPRDWQRLINNNWGFRPKRLNFKLFNIQVKEVTDNNGVKTIANNLTSTVQVFTDSDYQLPYVLGSAHEGCLPPFPADVFMIPQYGYLTLNDGSQAVGRSSFYCLEYFPSQMLRTGNNFQFSYEFENVPFHSSYAHSQSLDRLMNPLIDQYLYYLSKTINGSGSPHSKAQNQQTLKFSVAGPSNMAVQGRNYIPGPSYRQQRVSTTVTQNNNSEFAWPGASSWALNGRNSLMNPGPAMASHKEGEDRFFPLSGSLIFGKQGTGRDNVDADKVMITNEEEIKTTNPVATESYGQVATNHQSAQAQAQTGWVQNQGILPGMVWQDRDVYLQGPIWAKIPHTDGNFHPSPLMGGFGMKHPPPQILIKNTPVPADPPTAFNKDKLNSFITQYSTGQVSVEIEWELQKENSKRWNPEIQYTSNYYKSNNVEFAVNTEGVYSEPRPIGTRYLTRNL

SEQ ID NO: 982 - protein, 742 aa, synthetic construct
MAADGYLPDWLEDNLSEGIREWWALKPGAPQPKANQQHQDNARGLVLPGYKYLGPGNGLDKGEPVNAADAAALEHDKAYDQQLKAGDNPYLKYNHADAEFQERLKEDTSFGGNLGRAVFQAKKRLLEPLGLVEEAAKTAPGKKRPVEQSPQEPDSSAGIGKSGAQPAKKRLNFGQTGDTESVPDPQPIGEPPAAPSGVGSLTMASGGGAPVADNNEGADGVGSSSGNWHCDSQWLGDRVITTSTRTWALPTYNNHLYKQISNSTSGGSSNDNAYFGYSTPWGYFDFNRFHCHFSPRDWQRLINNNWGFRPKRLNFKLFNIQVKEVTDNNGVKTIANNLTSTVQVFTDSDYQLPYVLGSAHEGCLPPFPADVFMIPQYGYLTLNDGSQAVGRSSFYCLEYFPSQMLRTGNNFQFSYEFENVPFHSSYAHSQSLDRLMNPLIDQYLYYLSKTINGHDSPHKSGQNQQTLKFSVAGPSNMAVQGRNYIPGPSYRQQRVSTTVTQNNNSEFAWPGASSWALNGRNSLMNPGPAMASHKEGEDRFFPLSGSLIFGKQGTGRDNVDADKVMITNEEEIKTTNPVATESYGQVATNHQSAQAQAQTGWVQNQGILPGMVWQDRDVYLQGPIWAKIPHTDGNFHPSPLMGGFGMKHPPPQILIKNTPVPADPPTAFNKDKLNSFITQYSTGQVSVEIEWELQKENSKRWNPEIQYTSNYYKSNNVEFAVNTEGVYSEPRPIGTRYLTRNL

SEQ ID NO: 983 - DNA, 2229 bp, synthetic construct
  source 1..2229: mol_type = other DNA
atggctgccgatggttatcttccagattggctcgaggacaaccttagtgaaggaattcgcgagtggtgggctttgaaacctggagcccctcaacccaaggcaaatcaacaacatcaagacaacgctcgaggtcttgtgcttccgggttacaaataccttggacccggcaacggactcgacaagggggagccggtcaacgcagcagacgcggcggccctcgagcacgacaaggcctacgaccagcagctcaaggccggagacaacccgtacctcaagtacaaccacgccgacgccgagttccaggagcggctcaaagaagatacgtcttttgggggcaacctcgggcgagcagtcttccaggccaaaaagaggcttcttgaacctcttggtctggttgaggaagcggctaagacggctcctggaaagaagaggcctgtagagcagtctcctcaggaaccggactcctccgcgggtattggcaaatcgggtgcacagcccgctaaaaagagactcaatttcggtcagactggcgacacagagtcagtcccagaccctcaaccaatcggagaacctcccgcagccccctcaggtgtgggatctcttacaatggcttcaggtggtggcgcaccagtggcagacaataacgaaggtgccgatggagtgggtagttcctcgggaaattggcattgcgattcccaatggctgggggacagagtcatcaccaccagcacccgaacctgggccctgcccacctacaacaatcacctctacaagcaaatctccaacagcacatctggaggatcttcaaatgacaacgcctacttcggctacagcaccccctgggggtattttgacttcaacagattccactgccacttctcaccacgtgactggcagcgactcatcaacaacaactggggattccggcctaagcgactcaacttcaagctcttcaacattcaggtcaaagaggttacggacaacaatggagtcaagaccatcgccaataaccttaccagcacggtccaggtcttcacggactcagactatcagctcccgtacgtgctcgggtcggctcacgagggctgcctcccgccgttcccagcggacgttttcatgattcctcagtacgggtatctgacgcttaatgatggaagccaggccgtgggtcgttcgtccttttactgcctggaatatttcccgtcgcaaatgctaagaacgggtaacaacttccagttcagctacgagtttgagaacgtacctttccatagcagctacgctcacagccaaagcctggaccgactaatgaatccactcatcgaccaatacttgtattacttgagtaaaacaattaacggaagcggaagcccacacagcaaagcacaaaaccaacagaccttgaagttttcggtagctggtcctagcaacatggctgtccagggaagaaactacatacctggacccagctaccgacaacaacgtgtctcaaccactgtgactcaaaacaacaacagcgaatttgcttggcctggagcttcttcttgggctctcaatggacgtaatagcttgatgaatcctggacctgctatggccagccacaaagaaggagaggaccgtttctttcctttgtctggatctttaatttttggcaaacaaggaactggaagagacaacgtggatgcggacaaagtcatgataaccaacgaagaagaaattaaaactactaacccggtagcaacggagtcctatggacaagtggccacaaaccaccagagtgcccaagcacaggcgcagaccggctgggttcaaaaccaaggaatacttccgggtatggtttggcaggacagagatgtgtacctgcaaggacccatttgggccaaaattcctcacacggacggcaactttcacccttctccgctgatgggagggtttggaatgaagcacccgcctcctcagatcctcatcaaaaacacacctgtacctgcggatcctccaacggccttcaacaaggacaagctgaactctttcatcacccagtattctactggccaagtcagcgtggagatcgagtgggagctgcagaaggaaaacagcaagcgctggaacccggagatccagtacacttccaactattacaagtctaataatgttgaatttgctgttaatactgaaggtgtatatagtgaaccccgccccattggcacgcggtatttaacgaggaacttataa

SEQ ID NO: 984 - DNA, 2229 bp, synthetic construct
  source 1..2229: mol_type = other DNA
atggctgccgatggttatcttccagattggctcgaggacaaccttagtgaaggaattcgcgagtggtgggctttgaaacctggagcccctcaacccaaggcaaatcaacaacatcaagacaacgctcgaggtcttgtgcttccgggttacaaataccttggacccggcaacggactcgacaagggggagccggtcaacgcagcagacgcggcggccctcgagcacgacaaggcctacgaccagcagctcaaggccggagacaacccgtacctcaagtacaaccacgccgacgccgagttccaggagcggctcaaagaagatacgtcttttgggggcaacctcgggcgagcagtcttccaggccaaaaagaggcttcttgaacctcttggtctggttgaggaagcggctaagacggctcctggaaagaagaggcctgtagagcagtctcctcaggaaccggactcctccgcgggtattggcaaatcgggtgcacagcccgctaaaaagagactcaatttcggtcagactggcgacacagagtcagtcccagaccctcaaccaatcggagaacctcccgcagccccctcaggtgtgggatctcttacaatggcttcaggtggtggcgcaccagtggcagacaataacgaaggtgccgatggagtgggtagttcctcgggaaattggcattgcgattcccaatggctgggggacagagtcatcaccaccagcacccgaacctgggccctgcccacctacaacaatcacctctacaagcaaatctccaacagcacatctggaggatcttcaaatgacaacgcctacttcggctacagcaccccctgggggtattttgacttcaacagattccactgccacttctcaccacgtgactggcagcgactcatcaacaacaactggggattccggcctaagcgactcaacttcaagctcttcaacattcaggtcaaagaggttacggacaacaatggagtcaagaccatcgccaataaccttaccagcacggtccaggtcttcacggactcagactatcagctcccgtacgtgctcgggtcggctcacgagggctgcctcccgccgttcccagcggacgttttcatgattcctcagtacgggtatctgacgcttaatgatggaagccaggccgtgggtcgttcgtccttttactgcctggaatatttcccgtcgcaaatgctaagaacgggtaacaacttccagttcagctacgagtttgagaacgtacctttccatagcagctacgctcacagccaaagcctggaccgactaatgaatccactcatcgaccaatacttgtattacttgagtaaaacaattaacggacacgacagcccacacaaaagcggacaaaaccaacagaccttgaagttttcggtagctggtcctagcaacatggctgtccagggaagaaactacatacctggacccagctaccgacaacaacgtgtctcaaccactgtgactcaaaacaacaacagcgaatttgcttggcctggagcttcttcttgggctctcaatggacgtaatagcttgatgaatcctggacctgctatggccagccacaaagaaggagaggaccgtttctttcctttgtctggatctttaatttttggcaaacaaggaactggaagagacaacgtggatgcggacaaagtcatgataaccaacgaagaagaaattaaaactactaacccggtagcaacggagtcctatggacaagtggccacaaaccaccagagtgcccaagcacaggcgcagaccggctgggttcaaaaccaaggaatacttccgggtatggtttggcaggacagagatgtgtacctgcaaggacccatttgggccaaaattcctcacacggacggcaactttcacccttctccgctgatgggagggtttggaatgaagcacccgcctcctcagatcctcatcaaaaacacacctgtacctgcggatcctccaacggccttcaacaaggacaagctgaactctttcatcacccagtattctactggccaagtcagcgtggagatcgagtgggagctgcagaaggaaaacagcaagcgctggaacccggagatccagtacacttccaactattacaagtctaataatgttgaatttgctgttaatactgaaggtgtatatagtgaaccccgccccattggcacgcggtatttaacgaggaacttataa

SEQ ID NO: 985 - protein, 6 aa, synthetic construct
STHASR

SEQ ID NO: 986 - protein, 6 aa, synthetic construct
SQHKSG

SEQ ID NO: 987 - DNA, 21 bp, synthetic construct
  source 1..21: mol_type = other DNA
  misc_feature 1..19: note = RNA
  misc_feature 20..21: note = DNA
tgggatcgcccaataaacctt

SEQ ID NO: 988 - DNA, 21 bp, synthetic construct
  source 1..21: mol_type = other DNA
  misc_feature 1..19: note = RNA
  misc_feature 20..21: note = DNA
gggatcgcccaataaacactt

SEQ ID NO: 989 - DNA, 21 bp, synthetic construct
  source 1..21: mol_type = other DNA
  misc_feature 1..19: note = RNA
  misc_feature 20..21: note = DNA
atcgcccaataaacattcctt

SEQ ID NO: 990 - DNA, 21 bp, synthetic construct
  source 1..21: mol_type = other DNA
  misc_feature 1..19: note = RNA
  misc_feature 20..21: note = DNA
ccaataaacattcccttgctt

SEQ ID NO: 991 - DNA, 21 bp, synthetic construct
  source 1..21: mol_type = other DNA
  misc_feature 1..19: note = RNA
  misc_feature 20..21: note = DNA
caataaacattcccttggctt

SEQ ID NO: 992 - DNA, 21 bp, synthetic construct
  source 1..21: mol_type = other DNA
  misc_feature 1..19: note = RNA
  misc_feature 20..21: note = DNA
aataaacattcccttggactt

SEQ ID NO: 993 - DNA, 21 bp, synthetic construct
  source 1..21: mol_type = other DNA
  misc_feature 1..19: note = RNA
  misc_feature 20..21: note = DNA
ataaacattcccttggatctt

SEQ ID NO: 994 - DNA, 21 bp, synthetic construct
  source 1..21: mol_type = other DNA
  misc_feature 1..19: note = RNA
  misc_feature 20..21: note = DNA
taaacattcccttggatgctt

SEQ ID NO: 995 - DNA, 21 bp, synthetic construct
  source 1..21: mol_type = other DNA
  misc_feature 1..19: note = RNA
  misc_feature 20..21: note = DNA
aaacattcccttggatgtctt

SEQ ID NO: 996 - DNA, 21 bp, synthetic construct
  source 1..21: mol_type = other DNA
  misc_feature 1..19: note = RNA
  misc_feature 20..21: note = DNA
aacattcccttggatgtactt

SEQ ID NO: 997 - DNA, 21 bp, synthetic construct
  source 1..21: mol_type = other DNA
  misc_feature 1..19: note = RNA
  misc_feature 20..21: note = DNA
attcccttggatgtagtcctt

SEQ ID NO: 998 - DNA, 21 bp, synthetic construct
  source 1..21: mol_type = other DNA
  misc_feature 1..19: note = RNA
  misc_feature 20..21: note = DNA
cttggatgtagtctgaggctt

SEQ ID NO: 999 - DNA, 21 bp, synthetic construct
  source 1..21: mol_type = other DNA
  misc_feature 1..19: note = RNA
  misc_feature 20..21: note = DNA
ctgaggccccttaactcactt

SEQ ID NO: 1000 - DNA, 21 bp, synthetic construct
  source 1..21: mol_type = other DNA
  misc_feature 1..19: note = RNA
  misc_feature 20..21: note = DNA
gaggccccttaactcatcctt

SEQ ID NO: 1001 - DNA, 21 bp, synthetic construct
  source 1..21: mol_type = other DNA
  misc_feature 1..19: note = RNA
  misc_feature 20..21: note = DNA
aggccccttaactcatctctt

SEQ ID NO: 1002 - DNA, 21 bp, synthetic construct
  source 1..21: mol_type = other DNA
  misc_feature 1..19: note = RNA
  misc_feature 20..21: note = DNA
ccccttaactcatctgttctt

SEQ ID NO: 1003 - DNA, 21 bp, synthetic construct
  source 1..21: mol_type = other DNA
  misc_feature 1..19: note = RNA
  misc_feature 20..21: note = DNA
cccttaactcatctgttactt

SEQ ID NO: 1004 - DNA, 21 bp, synthetic construct
  source 1..21: mol_type = other DNA
  misc_feature 1..19: note = RNA
  misc_feature 20..21: note = DNA
ccttaactcatctgttatctt

SEQ ID NO: 1005 - DNA, 21 bp, synthetic construct
  source 1..21: mol_type = other DNA
  misc_feature 1..19: note = RNA
  misc_feature 20..21: note = DNA
cttaactcatctgttatcctt

SEQ ID NO: 1006 - DNA, 21 bp, synthetic construct
  source 1..21: mol_type = other DNA
  misc_feature 1..19: note = RNA
  misc_feature 20..21: note = DNA
ttaactcatctgttatccctt

SEQ ID NO: 1007 - DNA, 21 bp, synthetic construct
  source 1..21: mol_type = other DNA
  misc_feature 1..19: note = RNA
  misc_feature 20..21: note = DNA
taactcatctgttatcctctt

SEQ ID NO: 1008 - DNA, 21 bp, synthetic construct
  source 1..21: mol_type = other DNA
  misc_feature 1..19: note = RNA
  misc_feature 20..21: note = DNA
aactcatctgttatcctgctt

SEQ ID NO: 1009 - DNA, 21 bp, synthetic construct
  source 1..21: mol_type = other DNA
  misc_feature 1..19: note = RNA
  misc_feature 20..21: note = DNA
gttatcctgctagctgtactt

SEQ ID NO: 1010 - DNA, 21 bp, synthetic construct
  source 1..21: mol_type = other DNA
  misc_feature 1..19: note = RNA
  misc_feature 20..21: note = DNA
ctgctagctgtagaaatgctt

SEQ ID NO: 1011 - DNA, 21 bp, synthetic construct
  source 1..21: mol_type = other DNA
  misc_feature 1..19: note = RNA
  misc_feature 20..21: note = DNA
tgctagctgtagaaatgtctt

SEQ ID NO: 1012 - DNA, 21 bp, synthetic construct
  source 1..21: mol_type = other DNA
  misc_feature 1..19: note = RNA
  misc_feature 20..21: note = DNA
gctgtagaaatgtatcctctt

SEQ ID NO: 1013 - DNA, 21 bp, synthetic construct
  source 1..21: mol_type = other DNA
  misc_feature 1..19: note = RNA
  misc_feature 20..21: note = DNA
ctgtagaaatgtatcctgctt

SEQ ID NO: 1014 - DNA, 21 bp, synthetic construct
  source 1..21: mol_type = other DNA
  misc_feature 1..19: note = RNA
  misc_feature 20..21: note = DNA
tgtagaaatgtatcctgactt

SEQ ID NO: 1015 - DNA, 21 bp, synthetic construct
  source 1..21: mol_type = other DNA
  misc_feature 1..19: note = RNA
  misc_feature 20..21: note = DNA
gtagaaatgtatcctgatctt

SEQ ID NO: 1016 - DNA, 21 bp, synthetic construct
  source 1..21: mol_type = other DNA
  misc_feature 1..19: note = RNA
  misc_feature 20..21: note = DNA
aaatgtatcctgataaacctt

SEQ ID NO: 1017 - DNA, 21 bp, synthetic construct
  source 1..21: mol_type = other DNA
  misc_feature 1..19: note = RNA
  misc_feature 20..21: note = DNA
gtatcctgataaacattactt

SEQ ID NO: 1018 - DNA, 21 bp, synthetic construct
  source 1..21: mol_type = other DNA
  misc_feature 1..19: note = RNA
  misc_feature 20..21: note = DNA
ttaaacactgtaatcttactt

SEQ ID NO: 1019 - DNA, 21 bp, synthetic construct
  source 1..21: mol_type = other DNA
  misc_feature 1..19: note = RNA
  misc_feature 20..21: note = DNA
actgtaatcttaaaagtgctt

SEQ ID NO: 1020 - DNA, 21 bp, synthetic construct
  source 1..21: mol_type = other DNA
  misc_feature 1..19: note = RNA
  misc_feature 20..21: note = DNA
ctgtaatcttaaaagtgtctt

SEQ ID NO: 1021 - DNA, 21 bp, synthetic construct
  source 1..21: mol_type = other DNA
  misc_feature 1..19: note = RNA
  misc_feature 20..21: note = DNA
tgtaatcttaaaagtgtactt

SEQ ID NO: 1022 - DNA, 21 bp, synthetic construct
  source 1..21: mol_type = other DNA
  misc_feature 1..19: note = RNA
  misc_feature 20..21: note = DNA
gtaatcttaaaagtgtaactt

SEQ ID NO: 1023 - DNA, 21 bp, synthetic construct
  source 1..21: mol_type = other DNA
  misc_feature 1..19: note = RNA
  misc_feature 20..21: note = DNA
cttaaaagtgtaattgtgctt

SEQ ID NO: 1024 - DNA, 21 bp, synthetic construct
  source 1..21: mol_type = other DNA
  misc_feature 1..19: note = RNA
  misc_feature 20..21: note = DNA
tacctgtagtgagaaactctt

SEQ ID NO: 1025 - DNA, 21 bp, synthetic construct
  source 1..21: mol_type = other DNA
  misc_feature 1..19: note = RNA
  misc_feature 20..21: note = DNA
ttatgatcacttggaagactt

SEQ ID NO: 1026 - DNA, 21 bp, synthetic construct
  source 1..21: mol_type = other DNA
  misc_feature 1..19: note = RNA
  misc_feature 20..21: note = DNA
atgatcacttggaagattctt

SEQ ID NO: 1027 - DNA, 21 bp, synthetic construct
  source 1..21: mol_type = other DNA
  misc_feature 1..19: note = RNA
  misc_feature 20..21: note = DNA
atcacttggaagatttgtctt

SEQ ID NO: 1028 - DNA, 21 bp, synthetic construct
  source 1..21: mol_type = other DNA
  misc_feature 1..19: note = RNA
  misc_feature 20..21: note = DNA
tggaagatttgtatagttctt

SEQ ID NO: 1029 - DNA, 21 bp, synthetic construct
  source 1..21: mol_type = other DNA
  misc_feature 1..19: note = RNA
  misc_feature 20..21: note = DNA
tataaaactcagttaaaactt

SEQ ID NO: 1030 - DNA, 21 bp, synthetic construct
  source 1..21: mol_type = other DNA
  misc_feature 1..19: note = RNA
  misc_feature 20..21: note = DNA
aaactcagttaaaatgtcctt

SEQ ID NO: 1031 - DNA, 21 bp, synthetic construct
  source 1..21: mol_type = other DNA
  misc_feature 1..19: note = RNA
  misc_feature 20..21: note = DNA
gtctgtttcaatgacctgctt

SEQ ID NO: 1032 - DNA, 21 bp, synthetic construct
  source 1..21: mol_type = other DNA
  misc_feature 1..19: note = RNA
  misc_feature 20..21: note = DNA
atgacctgtattttgccactt

SEQ ID NO: 1033 - DNA, 21 bp, synthetic construct
  source 1..21: mol_type = other DNA
  misc_feature 1..19: note = RNA
  misc_feature 20..21: note = DNA
acctgtattttgccagacctt

SEQ ID NO: 1034 - DNA, 21 bp, synthetic construct
  source 1..21: mol_type = other DNA
  misc_feature 1..19: note = RNA
  misc_feature 20..21: note = DNA
cctgtattttgccagactctt

SEQ ID NO: 1035 - DNA, 21 bp, synthetic construct
  source 1..21: mol_type = other DNA
  misc_feature 1..19: note = RNA
  misc_feature 20..21: note = DNA
taaatcacagatgggtatctt

SEQ ID NO: 1036 - DNA, 21 bp, synthetic construct
  source 1..21: mol_type = other DNA
  misc_feature 1..19: note = RNA
  misc_feature 20..21: note = DNA
atcacagatgggtattaactt

SEQ ID NO: 1037 - DNA, 21 bp, synthetic construct
  source 1..21: mol_type = other DNA
  misc_feature 1..19: note = RNA
  misc_feature 20..21: note = DNA
tcacagatgggtattaaactt

SEQ ID NO: 1038 - DNA, 21 bp, synthetic construct
  source 1..21: mol_type = other DNA
  misc_feature 1..19: note = RNA
  misc_feature 20..21: note = DNA
acagatgggtattaaactctt

SEQ ID NO: 1039 - DNA, 21 bp, synthetic construct
  source 1..21: mol_type = other DNA
  misc_feature 1..19: note = RNA
  misc_feature 20..21: note = DNA
cagatgggtattaaacttctt

SEQ ID NO: 1040 - DNA, 21 bp, synthetic construct
  source 1..21: mol_type = other DNA
  misc_feature 1..19: note = RNA
  misc_feature 20..21: note = DNA
agatgggtattaaacttgctt

SEQ ID NO: 1041 - DNA, 21 bp, synthetic construct
  source 1..21: mol_type = other DNA
  misc_feature 1..19: note = RNA
  misc_feature 20..21: note = DNA
atgggtattaaacttgtcctt

SEQ ID NO: 1042 - DNA, 21 bp, synthetic construct
  source 1..21: mol_type = other DNA
  misc_feature 1..19: note = RNA
  misc_feature 20..21: note = DNA
taaacttgtcagaatttcctt

SEQ ID NO: 1043 - DNA, 21 bp, synthetic construct
  source 1..21: mol_type = other DNA
  misc_feature 1..19: note = RNA
  misc_feature 20..21: note = DNA
tcattcaagcctgtgaatctt

SEQ ID NO: 1044 - DNA, 21 bp, synthetic construct
  source 1..21: mol_type = other DNA
  misc_feature 1..19: note = RNA
  misc_feature 20..21: note = DNA
cattcaagcctgtgaatactt

SEQ ID NO: 1045 - DNA, 21 bp, synthetic construct
  source 1..21: mol_type = other DNA
  misc_feature 1..19: note = RNA
  misc_feature 20..21: note = DNA
aataaaaaccctgtatggctt

SEQ ID NO: 1046 - DNA, 21 bp, synthetic construct
  source 1..21: mol_type = other DNA
  misc_feature 1..19: note = RNA
  misc_feature 20..21: note = DNA
ataaaaaccctgtatggcctt

SEQ ID NO: 1047 - DNA, 21 bp, synthetic construct
  source 1..21: mol_type = other DNA
  misc_feature 1..19: note = RNA
  misc_feature 20..21: note = DNA
aaccctgtatggcacttactt

SEQ ID NO: 1048 - DNA, 21 bp, synthetic construct
  source 1..21: mol_type = other DNA
  misc_feature 1..19: note = RNA
  misc_feature 20..21: note = DNA
accctgtatggcacttatctt

SEQ ID NO: 1049 - DNA, 21 bp, synthetic construct
  source 1..21: mol_type = other DNA
  misc_feature 1..19: note = RNA
  misc_feature 20..21: note = DNA
gaggctattaaaagaatcctt

SEQ ID NO: 1050 - DNA, 21 bp, synthetic construct
  source 1..21: mol_type = other DNA
  misc_feature 1..19: note = RNA
  misc_feature 20..21: note = DNA
aaagaatccaaattcaaactt

SEQ ID NO: 1051 - DNA, 21 bp, synthetic construct
  source 1..21: mol_type = other DNA
  misc_feature 1..19: note = RNA
  misc_feature 20..21: note = DNA
gaatccaaattcaaactactt

SEQ ID NO: 1052 - DNA, 21 bp, synthetic construct
  source 1..21: mol_type = other DNA
  misc_feature 1..19: note = RNA
  misc_feature 20..21: note = DNA
tttataggccagacctccgtt

SEQ ID NO: 1053 - DNA, 21 bp, synthetic construct
  source 1..21: mol_type = other DNA
  misc_feature 1..19: note = RNA
  misc_feature 20..21: note = DNA
ttttataggccagacctcctt

SEQ ID NO: 1054 - DNA, 21 bp, synthetic construct
  source 1..21: mol_type = other DNA
  misc_feature 1..19: note = RNA
  misc_feature 20..21: note = DNA
tctttataggccagacctctt

SEQ ID NO: 1055 - DNA, 21 bp, synthetic construct
  source 1..21: mol_type = other DNA
  misc_feature 1..19: note = RNA
  misc_feature 20..21: note = DNA
tactttataggccagaccttt

SEQ ID NO: 1056 - DNA, 21 bp, synthetic construct
  source 1..21: mol_type = other DNA
  misc_feature 1..19: note = RNA
  misc_feature 20..21: note = DNA
ttactttataggccagacctt

SEQ ID NO: 1057 - DNA, 21 bp, synthetic construct
  source 1..21: mol_type = other DNA
  misc_feature 1..19: note = RNA
  misc_feature 20..21: note = DNA
tactactttataggccagatt

SEQ ID NO: 1058 - DNA, 21 bp, synthetic construct
  source 1..21: mol_type = other DNA
  misc_feature 1..19: note = RNA
  misc_feature 20..21: note = DNA
tgactactttataggccagtt

SEQ ID NO: 1059 - DNA, 21 bp, synthetic construct
  source 1..21: mol_type = other DNA
  misc_feature 1..19: note = RNA
  misc_feature 20..21: note = DNA
tcgactactttataggccatt

SEQ ID NO: 1060 - DNA, 21 bp, synthetic construct
  source 1..21: mol_type = other DNA
  misc_feature 1..19: note = RNA
  misc_feature 20..21: note = DNA
tgcgactactttataggcctt

SEQ ID NO: 1061 - DNA, 21 bp, synthetic construct
  source 1..21: mol_type = other DNA
  misc_feature 1..19: note = RNA
  misc_feature 20..21: note = DNA
tcgcgactactttataggctt

SEQ ID NO: 1062 - DNA, 21 bp, synthetic construct
  source 1..21: mol_type = other DNA
  misc_feature 1..19: note = RNA
  misc_feature 20..21: note = DNA
tccgcgactactttataggtt

SEQ ID NO: 1063 - DNA, 21 bp, synthetic construct
  source 1..21: mol_type = other DNA
  misc_feature 1..19: note = RNA
  misc_feature 20..21: note = DNA
tgctgcaggagactacgactt

SEQ ID NO: 1064 - DNA, 21 bp, synthetic construct
  source 1..21: mol_type = other DNA
  misc_feature 1..19: note = RNA
  misc_feature 20..21: note = DNA
tacgctgcaggagactacgtt

SEQ ID NO: 1065 - DNA, 21 bp, synthetic construct
  source 1..21: mol_type = other DNA
  misc_feature 1..19: note = RNA
  misc_feature 20..21: note = DNA
tgacgctgcaggagactactt

SEQ ID NO: 1066 - DNA, 21 bp, synthetic construct
  source 1..21: mol_type = other DNA
  misc_feature 1..19: note = RNA
  misc_feature 20..21: note = DNA
tagacgctgcaggagactatt

SEQ ID NO: 1067 - DNA, 21 bp, synthetic construct
  source 1..21: mol_type = other DNA
  misc_feature 1..19: note = RNA
  misc_feature 20..21: note = DNA
tcacggccttcgtcgccattt

SEQ ID NO: 1068 - DNA, 21 bp, synthetic construct
  source 1..21: mol_type = other DNA
  misc_feature 1..19: note = RNA
  misc_feature 20..21: note = DNA
tcgcacacggccttcgtcgtt

SEQ ID NO: 1069 - DNA, 21 bp, synthetic construct
  source 1..21: mol_type = other DNA
  misc_feature 1..19: note = RNA
  misc_feature 20..21: note = DNA
tagcacgcacacggccttctt

SEQ ID NO: 1070 - DNA, 21 bp, synthetic construct
  source 1..21: mol_type = other DNA
  misc_feature 1..19: note = RNA
  misc_feature 20..21: note = DNA
tttcagcacgcacacggcctt

SEQ ID NO: 1071 - DNA, 21 bp, synthetic construct
  source 1..21: mol_type = other DNA
  misc_feature 1..19: note = RNA
  misc_feature 20..21: note = DNA
tgcactgggccgtcgcccttt

SEQ ID NO: 1072 - DNA, 21 bp, synthetic construct
  source 1..21: mol_type = other DNA
  misc_feature 1..19: note = RNA
  misc_feature 20..21: note = DNA
taattgatgatgccctgcatt

SEQ ID NO: 1073 - DNA, 21 bp, synthetic construct
  source 1..21: mol_type = other DNA
  misc_feature 1..19: note = RNA
  misc_feature 20..21: note = DNA
taaattgatgatgccctgctt

SEQ ID NO: 1074 - DNA, 21 bp, synthetic construct
  source 1..21: mol_type = other DNA
  misc_feature 1..19: note = RNA
  misc_feature 20..21: note = DNA
tcgaaattgatgatgcccttt

SEQ ID NO: 1075 - DNA, 21 bp, synthetic construct
  source 1..21: mol_type = other DNA
  misc_feature 1..19: note = RNA
  misc_feature 20..21: note = DNA
ttcgaaattgatgatgccctt

SEQ ID NO: 1076 - DNA, 21 bp, synthetic construct
  source 1..21: mol_type = other DNA
  misc_feature 1..19: note = RNA
  misc_feature 20..21: note = DNA
tctcgaaattgatgatgcctt

SEQ ID NO: 1077 - DNA, 21 bp, synthetic construct
  source 1..21: mol_type = other DNA
  misc_feature 1..19: note = RNA
  misc_feature 20..21: note = DNA
tgctcgaaattgatgatgctt

SEQ ID NO: 1078 - DNA, 21 bp, synthetic construct
  source 1..21: mol_type = other DNA
  misc_feature 1..19: note = RNA
  misc_feature 20..21: note = DNA
ttgctcgaaattgatgatgtt

SEQ ID NO: 1079 - DNA, 21 bp, synthetic construct
  source 1..21: mol_type = other DNA
  misc_feature 1..19: note = RNA
  misc_feature 20..21: note = DNA
tttccttctgctcgaaatttt

SEQ ID NO: 1080 - DNA, 21 bp, synthetic construct
  source 1..21: mol_type = other DNA
  misc_feature 1..19: note = RNA
  misc_feature 20..21: note = DNA
tactttccttctgctcgaatt

SEQ ID NO: 1081 - DNA, 21 bp, synthetic construct
  source 1..21: mol_type = other DNA
  misc_feature 1..19: note = RNA
  misc_feature 20..21: note = DNA
ttactttccttctgctcgatt

SEQ ID NO: 1082 - DNA, 21 bp, synthetic construct
  source 1..21: mol_type = other DNA
  misc_feature 1..19: note = RNA
  misc_feature 20..21: note = DNA
taatgcttccccacacctttt

SEQ ID NO: 1083 - DNA, 21 bp, synthetic construct
  source 1..21: mol_type = other DNA
  misc_feature 1..19: note = RNA
  misc_feature 20..21: note = DNA
tttaatgcttccccacacctt

SEQ ID NO: 1084 - DNA, 21 bp, synthetic construct
  source 1..21: mol_type = other DNA
  misc_feature 1..19: note = RNA
  misc_feature 20..21: note = DNA
tgcaggccttcagtcagtctt

SEQ ID NO: 1085 - DNA, 21 bp, synthetic construct
  source 1..21: mol_type = other DNA
  misc_feature 1..19: note = RNA
  misc_feature 20..21: note = DNA
tatgcaggccttcagtcagtt

SEQ ID NO: 1086 - DNA, 21 bp, synthetic construct
  source 1..21: mol_type = other DNA
  misc_feature 1..19: note = RNA
  misc_feature 20..21: note = DNA
tcatgcaggccttcagtcatt

SEQ ID NO: 1087 - DNA, 21 bp, synthetic construct
  source 1..21: mol_type = other DNA
  misc_feature 1..19: note = RNA
  misc_feature 20..21: note = DNA
taatccatgcaggccttcatt

SEQ ID NO: 1088 - DNA, 21 bp, synthetic construct
  source 1..21: mol_type = other DNA
  misc_feature 1..19: note = RNA
  misc_feature 20..21: note = DNA
tgaatccatgcaggccttctt

SEQ ID NO: 1089 - DNA, 21 bp, synthetic construct
  source 1..21: mol_type = other DNA
  misc_feature 1..19: note = RNA
  misc_feature 20..21: note = DNA
tgaacatggaatccatgcatt

SEQ ID NO: 1090 - DNA, 21 bp, synthetic construct
  source 1..21: mol_type = other DNA
  misc_feature 1..19: note = RNA
  misc_feature 20..21: note = DNA
tatgaacatggaatccatgtt

SEQ ID NO: 1091 - DNA, 21 bp, synthetic construct
  source 1..21: mol_type = other DNA
  misc_feature 1..19: note = RNA
  misc_feature 20..21: note = DNA
tctcatgaacatggaatcctt

SEQ ID NO: 1092 - DNA, 21 bp, synthetic construct
  source 1..21: mol_type = other DNA
  misc_feature 1..19: note = RNA
  misc_feature 20..21: note = DNA
taaactcatgaacatggaatt

SEQ ID NO: 1093 - DNA, 21 bp, synthetic construct
  source 1..21: mol_type = other DNA
  misc_feature 1..19: note = RNA
  misc_feature 20..21: note = DNA
tatctccaaactcatgaactt

SEQ ID NO: 1094 - DNA, 21 bp, synthetic construct
  source 1..21: mol_type = other DNA
  misc_feature 1..19: note = RNA
  misc_feature 20..21: note = DNA
ttatctccaaactcatgaatt

SEQ ID NO: 1095 - DNA, 21 bp, synthetic construct
  source 1..21: mol_type = other DNA
  misc_feature 1..19: note = RNA
  misc_feature 20..21: note = DNA
tgtattatctccaaactcatt

SEQ ID NO: 1096 - DNA, 21 bp, synthetic construct
  source 1..21: mol_type = other DNA
  misc_feature 1..19: note = RNA
  misc_feature 20..21: note = DNA
ttgtattatctccaaactctt

SEQ ID NO: 1097 - DNA, 21 bp, synthetic construct
  source 1..21: mol_type = other DNA
  misc_feature 1..19: note = RNA
  misc_feature 20..21: note = DNA
tcctgcactggtacagccttt

SEQ ID NO: 1098 - DNA, 21 bp, synthetic construct
  source 1..21: mol_type = other DNA
  misc_feature 1..19: note = RNA
  misc_feature 20..21: note = DNA
tacctgcactggtacagcctt

SEQ ID NO: 1099 - DNA, 21 bp, synthetic construct
  source 1..21: mol_type = other DNA
  misc_feature 1..19: note = RNA
  misc_feature 20..21: note = DNA
tattaaagtgaggacctgctt

SEQ ID NO: 1100 - DNA, 21 bp, synthetic construct
  source 1..21: mol_type = other DNA
  misc_feature 1..19: note = RNA
  misc_feature 20..21: note = DNA
tgattaaagtgaggacctgtt

SEQ ID NO: 1101 - DNA, 21 bp, synthetic construct
  source 1..21: mol_type = other DNA
  misc_feature 1..19: note = RNA
  misc_feature 20..21: note = DNA
tgatagaggattaaagtgatt

SEQ ID NO: 1102 - DNA, 21 bp, synthetic construct
  source 1..21: mol_type = other DNA
  misc_feature 1..19: note = RNA
  misc_feature 20..21: note = DNA
taccgtgttttctggatagtt

SEQ ID NO: 1103 - DNA, 21 bp, synthetic construct
  source 1..21: mol_type = other DNA
  misc_feature 1..19: note = RNA
  misc_feature 20..21: note = DNA
tcaccgtgttttctggatatt

SEQ ID NO: 1104 - DNA, 21 bp, synthetic construct
  source 1..21: mol_type = other DNA
  misc_feature 1..19: note = RNA
  misc_feature 20..21: note = DNA
tccaccgtgttttctggattt

SEQ ID NO: 1105 - DNA, 21 bp, synthetic construct
  source 1..21: mol_type = other DNA
  misc_feature 1..19: note = RNA
  misc_feature 20..21: note = DNA
tgcccaccgtgttttctggtt

SEQ ID NO: 1106 - DNA, 21 bp, synthetic construct
  source 1..21: mol_type = other DNA
  misc_feature 1..19: note = RNA
  misc_feature 20..21: note = DNA
tttggcccaccgtgttttctt

SEQ ID NO: 1107 - DNA, 21 bp, synthetic construct
  source 1..21: mol_type = other DNA
  misc_feature 1..19: note = RNA
  misc_feature 20..21: note = DNA
ttttggcccaccgtgtttttt

SEQ ID NO: 1108 - DNA, 21 bp, synthetic construct
  source 1..21: mol_type = other DNA
  misc_feature 1..19: note = RNA
  misc_feature 20..21: note = DNA
ttcatcctttggcccaccgtt

SEQ ID NO: 1109 - DNA, 21 bp, synthetic construct
  source 1..21: mol_type = other DNA
  misc_feature 1..19: note = RNA
  misc_feature 20..21: note = DNA
tcatgcctctcttcatccttt

SEQ ID NO: 1110 - DNA, 21 bp, synthetic construct
  source 1..21: mol_type = other DNA
  misc_feature 1..19: note = RNA
  misc_feature 20..21: note = DNA
tcaacatgcctctcttcattt

SEQ ID NO: 1111 - DNA, 21 bp, synthetic construct
  source 1..21: mol_type = other DNA
  misc_feature 1..19: note = RNA
  misc_feature 20..21: note = DNA
tgtctccaacatgcctctctt

SEQ ID NO: 1112 - DNA, 21 bp, synthetic construct
  source 1..21: mol_type = other DNA
  misc_feature 1..19: note = RNA
  misc_feature 20..21: note = DNA
tagtctccaacatgcctcttt

SEQ ID NO: 1113 - DNA, 21 bp, synthetic construct
  source 1..21: mol_type = other DNA
  misc_feature 1..19: note = RNA
  misc_feature 20..21: note = DNA
ttgcccaagtctccaacattt

SEQ ID NO: 1114 - DNA, 21 bp, synthetic construct
  source 1..21: mol_type = other DNA
  misc_feature 1..19: note = RNA
  misc_feature 20..21: note = DNA
tattgcccaagtctccaactt

SEQ ID NO: 1115 - DNA, 21 bp, synthetic construct
  source 1..21: mol_type = other DNA
  misc_feature 1..19: note = RNA
  misc_feature 20..21: note = DNA
tcacattgcccaagtctcctt

SEQ ID NO: 1116 - DNA, 21 bp, synthetic construct
  source 1..21: mol_type = other DNA
  misc_feature 1..19: note = RNA
  misc_feature 20..21: note = DNA
tgtcagcagtcacattgcctt

SEQ ID NO: 1117 - DNA, 21 bp, synthetic construct
  source 1..21: mol_type = other DNA
  misc_feature 1..19: note = RNA
  misc_feature 20..21: note = DNA
tttgtcagcagtcacattgtt

SEQ ID NO: 1118 - DNA, 21 bp, synthetic construct
  source 1..21: mol_type = other DNA
  misc_feature 1..19: note = RNA
  misc_feature 20..21: note = DNA
tccacaccatctttgtcagtt

SEQ ID NO: 1119 - DNA, 21 bp, synthetic construct
  source 1..21: mol_type = other DNA
  misc_feature 1..19: note = RNA
  misc_feature 20..21: note = DNA
tgccacaccatctttgtcatt

SEQ ID NO: 1120 - DNA, 21 bp, synthetic construct
  source 1..21: mol_type = other DNA
  misc_feature 1..19: note = RNA
  misc_feature 20..21: note = DNA
tatgcaatggtctcctgagtt

SEQ ID NO: 1121 - DNA, 21 bp, synthetic construct
  source 1..21: mol_type = other DNA
  misc_feature 1..19: note = RNA
  misc_feature 20..21: note = DNA
tgatgcaatggtctcctgatt

SEQ ID NO: 1122 - DNA, 21 bp, synthetic construct
  source 1..21: mol_type = other DNA
  misc_feature 1..19: note = RNA
  misc_feature 20..21: note = DNA
tccaatgatgcaatggtcttt

SEQ ID NO: 1123 - DNA, 21 bp, synthetic construct
  source 1..21: mol_type = other DNA
  misc_feature 1..19: note = RNA
  misc_feature 20..21: note = DNA
tgccaatgatgcaatggtctt

SEQ ID NO: 1124 - DNA, 21 bp, synthetic construct
  source 1..21: mol_type = other DNA
  misc_feature 1..19: note = RNA
  misc_feature 20..21: note = DNA
ttgcggccaatgatgcaattt

SEQ ID NO: 1125 - DNA, 21 bp, synthetic construct
  source 1..21: mol_type = other DNA
  misc_feature 1..19: note = RNA
  misc_feature 20..21: note = DNA
taccagtgtgcggccaatgtt

SEQ ID NO: 1126 - DNA, 21 bp, synthetic construct
  source 1..21: mol_type = other DNA
  misc_feature 1..19: note = RNA
  misc_feature 20..21: note = DNA
tatggaccaccagtgtgcgtt

SEQ ID NO: 1127 - DNA, 21 bp, synthetic construct
  source 1..21: mol_type = other DNA
  misc_feature 1..19: note = RNA
  misc_feature 20..21: note = DNA
ttcatggaccaccagtgtgtt

SEQ ID NO: 1128 - DNA, 21 bp, synthetic construct
  source 1..21: mol_type = other DNA
  misc_feature 1..19: note = RNA
  misc_feature 20..21: note = DNA
tttcatggaccaccagtgttt

SEQ ID NO: 1129 - DNA, 21 bp, synthetic construct
  source 1..21: mol_type = other DNA
  misc_feature 1..19: note = RNA
  misc_feature 20..21: note = DNA
tctttttcatggaccaccatt

SEQ ID NO: 1130 - DNA, 21 bp, synthetic construct
  source 1..21: mol_type = other DNA
  misc_feature 1..19: note = RNA
  misc_feature 20..21: note = DNA
tctgctttttcatggaccatt

SEQ ID NO: 1131 - DNA, 21 bp, synthetic construct
  source 1..21: mol_type = other DNA
  misc_feature 1..19: note = RNA
  misc_feature 20..21: note = DNA
tgcccaagtcatctgcttttt

SEQ ID NO: 1132 - DNA, 21 bp, synthetic construct
  source 1..21: mol_type = other DNA
  misc_feature 1..19: note = RNA
  misc_feature 20..21: note = DNA
ttttgcccaagtcatctgctt

SEQ ID NO: 1133 - DNA, 21 bp, synthetic construct
  source 1..21: mol_type = other DNA
  misc_feature 1..19: note = RNA
  misc_feature 20..21: note = DNA
tcacctttgcccaagtcattt

SEQ ID NO: 1134 - DNA, 21 bp, synthetic construct
  source 1..21: mol_type = other DNA
  misc_feature 1..19: note = RNA
  misc_feature 20..21: note = DNA
tccacctttgcccaagtcatt

SEQ ID NO: 1135 - DNA, 21 bp, synthetic construct
  source 1..21: mol_type = other DNA
  misc_feature 1..19: note = RNA
  misc_feature 20..21: note = DNA
ttccacctttgcccaagtctt

SEQ ID NO: 1136 - DNA, 21 bp, synthetic construct
  source 1..21: mol_type = other DNA
  misc_feature 1..19: note = RNA
  misc_feature 20..21: note = DNA
tcgtttcctgtctttgtactt

SEQ ID NO: 1137 - DNA, 21 bp, synthetic construct
  source 1..21: mol_type = other DNA
  misc_feature 1..19: note = RNA
  misc_feature 20..21: note = DNA
tagcgtttcctgtctttgttt

SEQ ID NO: 1138 - DNA, 21 bp, synthetic construct
  source 1..21: mol_type = other DNA
  misc_feature 1..19: note = RNA
  misc_feature 20..21: note = DNA
tcagcgtttcctgtctttgtt

SEQ ID NO: 1139 - DNA, 21 bp, synthetic construct
  source 1..21: mol_type = other DNA
  misc_feature 1..19: note = RNA
  misc_feature 20..21: note = DNA
tcgacttccagcgtttccttt

SEQ ID NO: 1140 - DNA, 21 bp, synthetic construct
  source 1..21: mol_type = other DNA
  misc_feature 1..19: note = RNA
  misc_feature 20..21: note = DNA
tcaccacaagccaaacgactt

SEQ ID NO: 1141 - DNA, 21 bp, synthetic construct
  source 1..21: mol_type = other DNA
  misc_feature 1..19: note = RNA
  misc_feature 20..21: note = DNA
tacaccacaagccaaacgatt

SEQ ID NO: 1142 - DNA, 21 bp, synthetic construct
  source 1..21: mol_type = other DNA
  misc_feature 1..19: note = RNA
  misc_feature 20..21: note = DNA
ttacaccacaagccaaacgtt

SEQ ID NO: 1143 - DNA, 21 bp, synthetic construct
  source 1..21: mol_type = other DNA
  misc_feature 1..19: note = RNA
  misc_feature 20..21: note = DNA
tttacaccacaagccaaactt

SEQ ID NO: 1144 - DNA, 21 bp, synthetic construct
  source 1..21: mol_type = other DNA
  misc_feature 1..19: note = RNA
  misc_feature 20..21: note = DNA
taattacaccacaagccaatt

SEQ ID NO: 1145 - DNA, 21 bp, synthetic construct
  source 1..21: mol_type = other DNA
  misc_feature 1..19: note = RNA
  misc_feature 20..21: note = DNA
tccaattacaccacaagcctt

SEQ ID NO: 1146 - DNA, 21 bp, synthetic construct
  source 1..21: mol_type = other DNA
  misc_feature 1..19: note = RNA
  misc_feature 20..21: note = DNA
tcccaattacaccacaagctt

SEQ ID NO: 1147 - DNA, 21 bp, synthetic construct
  source 1..21: mol_type = other DNA
  misc_feature 1..19: note = RNA
  misc_feature 20..21: note = DNA
ttcccaattacaccacaagtt

SEQ ID NO: 1148 - DNA, 21 bp, synthetic construct
  source 1..21: mol_type = other DNA
  misc_feature 1..19: note = RNA
  misc_feature 20..21: note = DNA
tgatcccaattacaccacatt

SEQ ID NO: 1149 - DNA, 21 bp, synthetic construct
  source 1..21: mol_type = other DNA
  misc_feature 1..19: note = RNA
  misc_feature 20..21: note = DNA
tcgatcccaattacaccactt

SEQ ID NO: 1150 - DNA, 21 bp, synthetic construct
  source 1..21: mol_type = other DNA
  misc_feature 1..19: note = RNA
  misc_feature 20..21: note = DNA
tgcgatcccaattacaccatt

SEQ ID NO: 1151 - DNA, 21 bp, synthetic construct
  source 1..21: mol_type = other DNA
  misc_feature 1..19: note = RNA
  misc_feature 20..21: note = DNA
tttgggcgatcccaattactt

SEQ ID NO: 1152 - DNA, 21 bp, synthetic construct
  source 1..21: mol_type = other DNA
  misc_feature 1..19: note = RNA
  misc_feature 20..21: note = DNA
tattgggcgatcccaattatt

SEQ ID NO: 1153 - DNA, 21 bp, synthetic construct
  source 1..21: mol_type = other DNA
  misc_feature 1..19: note = RNA
  misc_feature 20..21: note = DNA
ttattgggcgatcccaatttt

SEQ ID NO: 1154 - DNA, 21 bp, synthetic construct
  source 1..21: mol_type = other DNA
  misc_feature 1..19: note = RNA
  misc_feature 20..21: note = DNA
tttattgggcgatcccaattt

SEQ ID NO: 1155 - DNA, 21 bp, synthetic construct
  source 1..21: mol_type = other DNA
  misc_feature 1..19: note = RNA
  misc_feature 20..21: note = DNA
ttttattgggcgatcccaatt

SEQ ID NO: 1156 - DNA, 21 bp, synthetic construct
  source 1..21: mol_type = other DNA
  misc_feature 1..19: note = RNA
  misc_feature 20..21: note = DNA
tgtttattgggcgatcccatt

SEQ ID NO: 1157 - DNA, 21 bp, synthetic construct
  source 1..21: mol_type = other DNA
  misc_feature 1..19: note = RNA
  misc_feature 20..21: note = DNA
ttgtttattgggcgatccctt

SEQ ID NO: 1158 - DNA, 21 bp, synthetic construct
  source 1..21: mol_type = other DNA
  misc_feature 1..19: note = RNA
  misc_feature 20..21: note = DNA
tgaatgtttattgggcgattt

SEQ ID NO: 1159 - DNA, 21 bp, synthetic construct
  source 1..21: mol_type = other DNA
  misc_feature 1..19: note = RNA
  misc_feature 20..21: note = DNA
tcaagggaatgtttattggtt

SEQ ID NO: 1160 - DNA, 21 bp, synthetic construct
  source 1..21: mol_type = other DNA
  misc_feature 1..19: note = RNA
  misc_feature 20..21: note = DNA
tccaagggaatgtttattgtt

SEQ ID NO: 1161 - DNA, 21 bp, synthetic construct
  source 1..21: mol_type = other DNA
  misc_feature 1..19: note = RNA
  misc_feature 20..21: note = DNA
ttccaagggaatgtttatttt

SEQ ID NO: 1162 - DNA, 21 bp, synthetic construct
  source 1..21: mol_type = other DNA
  misc_feature 1..19: note = RNA
  misc_feature 20..21: note = DNA
tatccaagggaatgtttattt

SEQ ID NO: 1163 - DNA, 21 bp, synthetic construct
  source 1..21: mol_type = other DNA
  misc_feature 1..19: note = RNA
  misc_feature 20..21: note = DNA
tcatccaagggaatgtttatt

SEQ ID NO: 1164 - DNA, 21 bp, synthetic construct
  source 1..21: mol_type = other DNA
  misc_feature 1..19: note = RNA
  misc_feature 20..21: note = DNA
tacatccaagggaatgttttt

SEQ ID NO: 1165 - DNA, 21 bp, synthetic construct
  source 1..21: mol_type = other DNA
  misc_feature 1..19: note = RNA
  misc_feature 20..21: note = DNA
ttacatccaagggaatgtttt

SEQ ID NO: 1166 - DNA, 21 bp, synthetic construct
  source 1..21: mol_type = other DNA
  misc_feature 1..19: note = RNA
  misc_feature 20..21: note = DNA
tgactacatccaagggaattt

SEQ ID NO: 1167 - DNA, 21 bp, synthetic construct
  source 1..21: mol_type = other DNA
  misc_feature 1..19: note = RNA
  misc_feature 20..21: note = DNA
tcctcagactacatccaagtt

SEQ ID NO: 1168 - DNA, 21 bp, synthetic construct
  source 1..21: mol_type = other DNA
  misc_feature 1..19: note = RNA
  misc_feature 20..21: note = DNA
ttgagttaaggggcctcagtt

SEQ ID NO: 1169 - DNA, 21 bp, synthetic construct
  source 1..21: mol_type = other DNA
  misc_feature 1..19: note = RNA
  misc_feature 20..21: note = DNA
tgatgagttaaggggcctctt

SEQ ID NO: 1170 - DNA, 21 bp, synthetic construct
  source 1..21: mol_type = other DNA
  misc_feature 1..19: note = RNA
  misc_feature 20..21: note = DNA
tagatgagttaaggggccttt

SEQ ID NO: 1171 - DNA, 21 bp, synthetic construct
  source 1..21: mol_type = other DNA
  misc_feature 1..19: note = RNA
  misc_feature 20..21: note = DNA
taacagatgagttaaggggtt

SEQ ID NO: 1172 - DNA, 21 bp, synthetic construct
  source 1..21: mol_type = other DNA
  misc_feature 1..19: note = RNA
  misc_feature 20..21: note = DNA
ttaacagatgagttaagggtt

SEQ ID NO: 1173 - DNA, 21 bp, synthetic construct
  source 1..21: mol_type = other DNA
  misc_feature 1..19: note = RNA
  misc_feature 20..21: note = DNA
tataacagatgagttaaggtt

SEQ ID NO: 1174 - DNA, 21 bp, synthetic construct
  source 1..21: mol_type = other DNA
  misc_feature 1..19: note = RNA
  misc_feature 20..21: note = DNA
tgataacagatgagttaagtt

SEQ ID NO: 1175 - DNA, 21 bp, synthetic construct
  source 1..21: mol_type = other DNA
  misc_feature 1..19: note = RNA
  misc_feature 20..21: note = DNA
tggataacagatgagttaatt

SEQ ID NO: 1176 - DNA, 21 bp, synthetic construct
  source 1..21: mol_type = other DNA
  misc_feature 1..19: note = RNA
  misc_feature 20..21: note = DNA
taggataacagatgagttatt

SEQ ID NO: 1177 - DNA, 21 bp, synthetic construct
  source 1..21: mol_type = other DNA
  misc_feature 1..19: note = RNA
  misc_feature 20..21: note = DNA
tcaggataacagatgagtttt

SEQ ID NO: 1178 - DNA, 21 bp, synthetic construct
  source 1..21: mol_type = other DNA
  misc_feature 1..19: note = RNA
  misc_feature 20..21: note = DNA
ttacagctagcaggataactt

SEQ ID NO: 1179 - DNA, 21 bp, synthetic construct
  source 1..21: mol_type = other DNA
  misc_feature 1..19: note = RNA
  misc_feature 20..21: note = DNA
tcatttctacagctagcagtt

SEQ ID NO: 1180 - DNA, 21 bp, synthetic construct
  source 1..21: mol_type = other DNA
  misc_feature 1..19: note = RNA
  misc_feature 20..21: note = DNA
tacatttctacagctagcatt

SEQ ID NO: 1181 - DNA, 21 bp, synthetic construct
  source 1..21: mol_type = other DNA
  misc_feature 1..19: note = RNA
  misc_feature 20..21: note = DNA
taggatacatttctacagctt

SEQ ID NO: 1182 - DNA, 21 bp, synthetic construct
  source 1..21: mol_type = other DNA
  misc_feature 1..19: note = RNA
  misc_feature 20..21: note = DNA
tcaggatacatttctacagtt

SEQ ID NO: 1183 - DNA, 21 bp, synthetic construct
  source 1..21: mol_type = other DNA
  misc_feature 1..19: note = RNA
  misc_feature 20..21: note = DNA
ttcaggatacatttctacatt

SEQ ID NO: 1184 - DNA, 21 bp, synthetic construct
  source 1..21: mol_type = other DNA
  misc_feature 1..19: note = RNA
  misc_feature 20..21: note = DNA
tatcaggatacatttctactt

SEQ ID NO: 1185 - DNA, 21 bp, synthetic construct
  source 1..21: mol_type = other DNA
  misc_feature 1..19: note = RNA
  misc_feature 20..21: note = DNA
tgtttatcaggatacattttt

SEQ ID NO: 1186 - DNA, 21 bp, synthetic construct
  source 1..21: mol_type = other DNA
  misc_feature 1..19: note = RNA
  misc_feature 20..21: note = DNA
ttaatgtttatcaggatactt

SEQ ID NO: 1187 - DNA, 21 bp, synthetic construct
  source 1..21: mol_type = other DNA
  misc_feature 1..19: note = RNA
  misc_feature 20..21: note = DNA
ttaagattacagtgtttaatt

SEQ ID NO: 1188 - DNA, 21 bp, synthetic construct
  source 1..21: mol_type = other DNA
  misc_feature 1..19: note = RNA
  misc_feature 20..21: note = DNA
tcacttttaagattacagttt

SEQ ID NO: 1189 - DNA, 21 bp, synthetic construct
  source 1..21: mol_type = other DNA
  misc_feature 1..19: note = RNA
  misc_feature 20..21: note = DNA
tacacttttaagattacagtt

SEQ ID NO: 1190 - DNA, 21 bp, synthetic construct
  source 1..21: mol_type = other DNA
  misc_feature 1..19: note = RNA
  misc_feature 20..21: note = DNA
ttacacttttaagattacatt

SEQ ID NO: 1191 - DNA, 21 bp, synthetic construct
  source 1..21: mol_type = other DNA
  misc_feature 1..19: note = RNA
  misc_feature 20..21: note = DNA
tttacacttttaagattactt

SEQ ID NO: 1192 - DNA, 21 bp, synthetic construct
  source 1..21: mol_type = other DNA
  misc_feature 1..19: note = RNA
  misc_feature 20..21: note = DNA
tcacaattacacttttaagtt

SEQ ID NO: 1193 - DNA, 21 bp, synthetic construct
  source 1..21: mol_type = other DNA
  misc_feature 1..19: note = RNA
  misc_feature 20..21: note = DNA
tagtttctcactacaggtatt

SEQ ID NO: 1194 - DNA, 21 bp, synthetic construct
  source 1..21: mol_type = other DNA
  misc_feature 1..19: note = RNA
  misc_feature 20..21: note = DNA
ttcttccaagtgatcataatt

SEQ ID NO: 1195 - DNA, 21 bp, synthetic construct
  source 1..21: mol_type = other DNA
  misc_feature 1..19: note = RNA
  misc_feature 20..21: note = DNA
taatcttccaagtgatcattt

SEQ ID NO: 1196 - DNA, 21 bp, synthetic construct
  source 1..21: mol_type = other DNA
  misc_feature 1..19: note = RNA
  misc_feature 20..21: note = DNA
tacaaatcttccaagtgattt

SEQ ID NO: 1197 - DNA, 21 bp, synthetic construct
  source 1..21: mol_type = other DNA
  misc_feature 1..19: note = RNA
  misc_feature 20..21: note = DNA
taactatacaaatcttccatt

SEQ ID NO: 1198 - DNA, 21 bp, synthetic construct
  source 1..21: mol_type = other DNA
  misc_feature 1..19: note = RNA
  misc_feature 20..21: note = DNA
tttttaactgagttttatatt

SEQ ID NO: 1199 - DNA, 21 bp, synthetic construct
  source 1..21: mol_type = other DNA
  misc_feature 1..19: note = RNA
  misc_feature 20..21: note = DNA
tgacattttaactgagttttt

SEQ ID NO: 1200 - DNA, 21 bp, synthetic construct
  source 1..21: mol_type = other DNA
  misc_feature 1..19: note = RNA
  misc_feature 20..21: note = DNA
tcaggtcattgaaacagactt

SEQ ID NO: 1201 - DNA, 21 bp, synthetic construct
  source 1..21: mol_type = other DNA
  misc_feature 1..19: note = RNA
  misc_feature 20..21: note = DNA
ttggcaaaatacaggtcattt

SEQ ID NO: 1202 - DNA, 21 bp, synthetic construct
  source 1..21: mol_type = other DNA
  misc_feature 1..19: note = RNA
  misc_feature 20..21: note = DNA
tgtctggcaaaatacaggttt

SEQ ID NO: 1203 - DNA, 21 bp, synthetic construct
  source 1..21: mol_type = other DNA
  misc_feature 1..19: note = RNA
  misc_feature 20..21: note = DNA
tagtctggcaaaatacaggtt

SEQ ID NO: 1204 - DNA, 21 bp, synthetic construct
  source 1..21: mol_type = other DNA
  misc_feature 1..19: note = RNA
  misc_feature 20..21: note = DNA
tatacccatctgtgatttatt

SEQ ID NO: 1205 - DNA, 21 bp, synthetic construct
  source 1..21: mol_type = other DNA
  misc_feature 1..19: note = RNA
  misc_feature 20..21: note = DNA
tttaatacccatctgtgattt

SEQ ID NO: 1206 - DNA, 21 bp, synthetic construct
  source 1..21: mol_type = other DNA
  misc_feature 1..19: note = RNA
  misc_feature 20..21: note = DNA
ttttaatacccatctgtgatt

SEQ ID NO: 1207 - DNA, 21 bp, synthetic construct
  source 1..21: mol_type = other DNA
  misc_feature 1..19: note = RNA
  misc_feature 20..21: note = DNA
tagtttaatacccatctgttt

SEQ ID NO: 1208 - DNA, 21 bp, synthetic construct
  source 1..21: mol_type = other DNA
  misc_feature 1..19: note = RNA
  misc_feature 20..21: note = DNA
taagtttaatacccatctgtt

SEQ ID NO: 1209 - DNA, 21 bp, synthetic construct
  source 1..21: mol_type = other DNA
  misc_feature 1..19: note = RNA
  misc_feature 20..21: note = DNA
tcaagtttaatacccatcttt

SEQ ID NO: 1210 - DNA, 21 bp, synthetic construct
  source 1..21: mol_type = other DNA
  misc_feature 1..19: note = RNA
  misc_feature 20..21: note = DNA
tgacaagtttaatacccattt

SEQ ID NO: 1211 - DNA, 21 bp, synthetic construct
  source 1..21: mol_type = other DNA
  misc_feature 1..19: note = RNA
  misc_feature 20..21: note = DNA
tgaaattctgacaagtttatt

SEQ ID NO: 1212 - DNA, 21 bp, synthetic construct
  source 1..21: mol_type = other DNA
  misc_feature 1..19: note = RNA
  misc_feature 20..21: note = DNA
tattcacaggcttgaatgatt

SEQ ID NO: 1213 - DNA, 21 bp, synthetic construct
  source 1..21: mol_type = other DNA
  misc_feature 1..19: note = RNA
  misc_feature 20..21: note = DNA
ttattcacaggcttgaatgtt

SEQ ID NO: 1214 - DNA, 21 bp, synthetic construct
  source 1..21: mol_type = other DNA
  misc_feature 1..19: note = RNA
  misc_feature 20..21: note = DNA
tccatacagggtttttatttt

SEQ ID NO: 1215 - DNA, 21 bp, synthetic construct
  source 1..21: mol_type = other DNA
  misc_feature 1..19: note = RNA
  misc_feature 20..21: note = DNA
tgccatacagggtttttattt

SEQ ID NO: 1216 - DNA, 21 bp, synthetic construct
  source 1..21: mol_type = other DNA
  misc_feature 1..19: note = RNA
  misc_feature 20..21: note = DNA
ttaagtgccatacagggtttt

SEQ ID NO: 1217 - DNA, 21 bp, synthetic construct
  source 1..21: mol_type = other DNA
  misc_feature 1..19: note = RNA
  misc_feature 20..21: note = DNA
tataagtgccatacagggttt

SEQ ID NO: 1218 - DNA, 21 bp, synthetic construct
  source 1..21: mol_type = other DNA
  misc_feature 1..19: note = RNA
  misc_feature 20..21: note = DNA
tgattcttttaatagcctctt

SEQ ID NO: 1219 - DNA, 21 bp, synthetic construct
  source 1..21: mol_type = other DNA
  misc_feature 1..19: note = RNA
  misc_feature 20..21: note = DNA
ttttgaatttggattcttttt

SEQ ID NO: 1220 - DNA, 21 bp, synthetic construct
  source 1..21: mol_type = other DNA
  misc_feature 1..19: note = RNA
  misc_feature 20..21: note = DNA
ttagtttgaatttggattctt

SEQ ID NO: 1221 - RNA, 21 nt, synthetic construct
  source 1..21: mol_type = other RNA
caatgtgactgctgacaaccc

SEQ ID NO: 1222 - RNA, 21 nt, synthetic construct
  source 1..21: mol_type = other RNA
tttgtcagcagtcacattgtt

SEQ ID NO: 1223 - RNA, 21 nt, synthetic construct
  source 1..21: mol_type = other RNA
caatgtgactgctgacaatcc

SEQ ID NO: 1224 - RNA, 21 nt, synthetic construct
  source 1..21: mol_type = other RNA
caatgtgactgctgacaagcc

SEQ ID NO: 1225 - RNA, 21 nt, synthetic construct
  source 1..21: mol_type = other RNA
caatgtgactgctgacaaacc

SEQ ID NO: 1226 - RNA, 21 nt, synthetic construct
  source 1..21: mol_type = other RNA
caatgtgacagctgacaaacc

SEQ ID NO: 1227 - RNA, 20 nt, synthetic construct
  source 1..20: mol_type = other RNA
caatgtgactgctgacaacc

SEQ ID NO: 1228 - RNA, 22 nt, synthetic construct
  source 1..22: mol_type = other RNA
caatgtgactgctgacaatccc

SEQ ID NO: 1229 - RNA, 21 nt, synthetic construct
  source 1..21: mol_type = other RNA
caatgtgactgctgacaacac

SEQ ID NO: 1230 - RNA, 21 nt, synthetic construct
  source 1..21: mol_type = other RNA
tttgtcagcagtcacattgtc

SEQ ID NO: 1231 - RNA, 21 nt, synthetic construct
  source 1..21: mol_type = other RNA
caatgtgactgctgacaaatc

SEQ ID NO: 1232 - RNA, 21 nt, synthetic construct
  source 1..21: mol_type = other RNA
caatgtgactgctgacaattc

SEQ ID NO: 1233 - RNA, 21 nt, synthetic construct
  source 1..21: mol_type = other RNA
tttgtcagcagtcacattgac

SEQ ID NO: 1234 - RNA, 22 nt, synthetic construct
  source 1..22: mol_type = other RNA
caatgtgactgctgacaatccc

SEQ ID NO: 1235 - RNA, 21 nt, synthetic construct
  source 1..21: mol_type = other RNA
cgacgaaggccgtgtgcgccc

SEQ ID NO: 1236 - RNA, 21 nt, synthetic construct
  source 1..21: mol_type = other RNA
tcgcacacggccttcgtcgtt

SEQ ID NO: 1237 - RNA, 21 nt, synthetic construct
  source 1..21: mol_type = other RNA
tgacttgggcaaaggtggccc

SEQ ID NO: 1238 - RNA, 21 nt, synthetic construct
  source 1..21: mol_type = other RNA
tccacctttgcccaagtcatt

SEQ ID NO: 1239 - RNA, 21 nt, synthetic construct
  source 1..21: mol_type = other RNA
aactcatctgttatcctgccc

SEQ ID NO: 1240 - RNA, 21 nt, synthetic construct
  source 1..21: mol_type = other RNA
tcaggataacagatgagtttt

SEQ ID NO: 1241 - RNA, 21 nt, synthetic construct
  source 1..21: mol_type = other RNA
ccccttaactcatctgttccc

SEQ ID NO: 1242 - protein, 16 aa, synthetic construct
TDKMSGSPHSKAQNQQ

SEQ ID NO: 1243 - RNA, 21 nt, synthetic construct
  source 1..21: mol_type = other RNA
cccttaactcatctgttaccc

SEQ ID NO: 1244 - protein, 16 aa, synthetic construct
TINGSGSPHSKAQKLN

SEQ ID NO: 1245 - RNA, 21 nt, synthetic construct
  source 1..21: mol_type = other RNA
aactcatctgttatcttgccc

SEQ ID NO: 1246 - RNA, 21 nt, synthetic construct
  source 1..21: mol_type = other RNA
gctgtggaaatgtatcttccc

SEQ ID NO: 1247 - RNA, 21 nt, synthetic construct
  source 1..21: mol_type = other RNA
taggatacatttctacagctt

SEQ ID NO: 1248 - RNA, 21 nt, synthetic construct
  source 1..21: mol_type = other RNA
tgacttgggcaaaggtgagcc

SEQ ID NO: 1249 - RNA, 21 nt, synthetic construct
  source 1..21: mol_type = other RNA
ccccttaactcatctgttgcc

SEQ ID NO: 1250 - RNA, 21 nt, synthetic construct
  source 1..21: mol_type = other RNA
cccttaactcatctgttagcc

SEQ ID NO: 1251 - RNA, 21 nt, synthetic construct
  source 1..21: mol_type = other RNA
aactcatctgttatcttagcc

SEQ ID NO: 1252 - RNA, 21 nt, synthetic construct
  source 1..21: mol_type = other RNA
gctgtggaaatgtatcttgcc

SEQ ID NO: 1253 - RNA, 21 nt, synthetic construct
  source 1..21: mol_type = other RNA
tgacttgggcaaaggtaggcc

SEQ ID NO: 1254 - RNA, 21 nt, synthetic construct
  source 1..21: mol_type = other RNA
ccccttaacacatctgttacc

SEQ ID NO: 1255 - protein, 16 aa, synthetic construct
TDRMSGSPHSKAQNQQ

SEQ ID NO: 1256 - RNA, 21 nt, synthetic construct
  source 1..21: mol_type = other RNA
aactcatctcttatcttgccc

SEQ ID NO: 1257 - RNA, 21 nt, synthetic construct
  source 1..21: mol_type = other RNA
gctgtggaattgtatcttgcc

SEQ ID NO: 1258 - RNA, 21 nt, synthetic construct
  source 1..21: mol_type = other RNA
tgacttggggaaaggtgagcc

SEQ ID NO: 1259 - RNA, 21 nt, synthetic construct
  source 1..21: mol_type = other RNA
aactcatctgttatcttggcc

SEQ ID NO: 1260 - protein, 16 aa, synthetic construct
TIPIDGSPHSKAQNQQ

SEQ ID NO: 1261 - RNA, 21 nt, synthetic construct
  source 1..21: mol_type = other RNA
tgacttgggcaaaggtagccc

SEQ ID NO: 1262 - protein, 7 aa, synthetic construct
TLAVPFK

SEQ ID NO: 1263 - RNA, 19 nt, synthetic construct
  source 1..19: mol_type = other RNA
caatgtgactgctgacaaa

SEQ ID NO: 1264 - RNA, 21 nt, synthetic construct
  source 1..21: mol_type = other RNA
tttgtcagcagtcacattgtc

SEQ ID NO: 1265 - RNA, 21 nt, synthetic construct
  source 1..21: mol_type = other RNA
gcaggtcctcactttaatgcc

SEQ ID NO: 1266 - RNA, 21 nt, synthetic construct
  source 1..21: mol_type = other RNA
gattaaagtgaggacctgctt

SEQ ID NO: 1267 - RNA, 21 nt, synthetic construct
  source 1..21: mol_type = other RNA
ggcaatgtgactgctgacccc

SEQ ID NO: 1268 - RNA, 21 nt, synthetic construct
  source 1..21: mol_type = other RNA
tgtcagcagtcacattgcctt

SEQ ID NO: 1269 - RNA, 21 nt, synthetic construct
  source 1..21: mol_type = other RNA
gcaggtcctcactttaattcc

SEQ ID NO: 1270 - RNA, 21 nt, synthetic construct
  source 1..21: mol_type = other RNA
ggcaatgtgactgctgatgcc

SEQ ID NO: 1271 - RNA, 21 nt, synthetic construct
  source 1..21: mol_type = other RNA
gcaggtcctcactttaatccc

SEQ ID NO: 1272 - RNA, 21 nt, synthetic construct
  source 1..21: mol_type = other RNA
ggcaatgtgactgctgatacc

SEQ ID NO: 1273 - RNA, 21 nt, synthetic construct
  source 1..21: mol_type = other RNA
gcaggtcctgactttaatccc

SEQ ID NO: 1274 - RNA, 21 nt, synthetic construct
  source 1..21: mol_type = other RNA
ggcaatgtgtctgctgatacc

SEQ ID NO: 1275 - RNA, 22 nt, synthetic construct
  source 1..22: mol_type = other RNA
gattaaagtgaggacctgcttt

SEQ ID NO: 1276 - RNA, 22 nt, synthetic construct
  source 1..22: mol_type = other RNA
tgtcagcagtcacattgccttt

SEQ ID NO: 1277 - RNA, 21 nt, synthetic construct
  source 1..21: mol_type = other RNA
tcaccacaagccaaacgactt

SEQ ID NO: 1278 - RNA, 21 nt, synthetic construct
  source 1..21: mol_type = other RNA
tgattaaagtgaggacctgtt

SEQ ID NO: 1279 - protein, 16 aa, synthetic construct
GVLGSGSPHSKAQNQQ

SEQ ID NO: 1280 - RNA, 21 nt, synthetic construct
  source 1..21: mol_type = other RNA
tacaccacaagccaaacgatt

SEQ ID NO: 1281 - RNA, 22 nt, synthetic construct
  source 1..22: mol_type = other RNA
tcaccacaagccaaacgacttt

SEQ ID NO: 1282 - RNA, 21 nt, synthetic construct
  source 1..21: mol_type = other RNA
tgccagcagtcacattgcctt

SEQ ID NO: 1283 - RNA, 21 nt, synthetic construct
  source 1..21: mol_type = other RNA
gtcgtttggcttgtggtggct

SEQ ID NO: 1284 - RNA, 21 nt, synthetic construct
  source 1..21: mol_type = other RNA
caggtcctcactttaatcgct

SEQ ID NO: 1285 - RNA, 21 nt, synthetic construct
  source 1..21: mol_type = other RNA
gcaggtcctcactttaatgcc

SEQ ID NO: 1286 - protein, 16 aa, synthetic construct
TINGSGSPHSKAQKVI

SEQ ID NO: 1287 - RNA, 21 nt, synthetic construct
  source 1..21: mol_type = other RNA
tcgtttggcttgtggtgtgct

SEQ ID NO: 1288 - RNA, 21 nt, synthetic construct
  source 1..21: mol_type = other RNA
gtcgtttggcttgtggtggcc

SEQ ID NO: 1289 - RNA, 21 nt, synthetic construct
  source 1..21: mol_type = other RNA
caggtcctcactttaatcgcc

SEQ ID NO: 1290 - RNA, 21 nt, synthetic construct
  source 1..21: mol_type = other RNA
tcgtttggcttgtggtgtgcc

SEQ ID NO: 1291 - RNA, 21 nt, synthetic construct
  source 1..21: mol_type = other RNA
ggcaatgtgactgctggtgcc

SEQ ID NO: 1292 - RNA, 21 nt, synthetic construct
  source 1..21: mol_type = other RNA
ggcaatgtgactgctggtacc

SEQ ID NO: 1293 - RNA, 21 nt, synthetic construct
  source 1..21: mol_type = other RNA
ggcaatgtgtctgctggtacc

SEQ ID NO: 1294 - RNA, 21 nt, synthetic construct
  source 1..21: mol_type = other RNA
ggcaatgtgactgctggcccc

SEQ ID NO: 1295 - protein, 16 aa, synthetic construct
TIPAIGSPHSKAQNQQ

SEQ ID NO: 1296 - protein, 16 aa, synthetic construct
TINGSGSPHSKARGLQ

SEQ ID NO: 1297 - protein, 16 aa, synthetic construct
TELGSGSPHSKAQNQQ

SEQ ID NO: 1298 - protein, 16 aa, synthetic construct
AETGSGSPHSKAQNQQ

SEQ ID NO: 1299 - protein, 16 aa, synthetic construct
TINGSGSPHSKLQKQQ

SEQ ID NO: 1300 - protein, 16 aa, synthetic construct
TINGSGSPHSKAPSLQ

SEQ ID NO: 1301 - protein, 16 aa, synthetic construct
TINGSGSPHSKAQRDQ

SEQ ID NO: 1302 - protein, 16 aa, synthetic construct
TDVGSGSPHSKAQNQQ

SEQ ID NO: 1303 - protein, 16 aa, synthetic construct
TINGSGSPHSKNRDQQ

SEQ ID NO: 1304 - protein, 16 aa, synthetic construct
SINGSGSPHSKAPNLQ

SEQ ID NO: 1305 - protein, 16 aa, synthetic construct
TINGSGSPHSKAQAKG

SEQ ID NO: 1306 - protein, 16 aa, synthetic construct
TVNGSGSPHSKAQDKQ

SEQ ID NO: 1307 - protein, 16 aa, synthetic construct
TINGGGSPHSKAQNPQ

SEQ ID NO: 1308 - protein, 16 aa, synthetic construct
TINGSGSPHSKAQSAH

SEQ ID NO: 1309 - protein, 16 aa, synthetic construct
TINGNGSPHSKSQNQH

SEQ ID NO: 1310 - protein, 16 aa, synthetic construct
TVPTSGSPHSKAQNQQ

SEQ ID NO: 1311 - protein, 16 aa, synthetic construct
TIDGSGSPHSKSQNHQ

SEQ ID NO: 1312 - protein, 16 aa, synthetic construct
TDVKSGSPHSKAQNQQ

SEQ ID NO: 1313 - protein, 16 aa, synthetic construct
AINRSGSPHSKAQDQQ

SEQ ID NO: 1314 - protein, 16 aa, synthetic construct
TINGSGSPHSKAQSTM

SEQ ID NO: 1315 - protein, 16 aa, synthetic construct
TVNASGSPHSKAQNQL

SEQ ID NO: 1316 - protein, 16 aa, synthetic construct
TINGSGSPHSKAQREM

SEQ ID NO: 1317 - protein, 16 aa, synthetic construct
TVHGSGSPHSKAQSQQ

SEQ ID NO: 1318 - protein, 16 aa, synthetic construct
TINGGGSPHSKSQNRQ

SEQ ID NO: 1319 - protein, 16 aa, synthetic construct
TINGSGSPHSKAQYRA

SEQ ID NO: 1320 - protein, 16 aa, synthetic construct
TINGGGSPHSKAQRQQ

SEQ ID NO: 1321 - protein, 16 aa, synthetic construct
TEPMSGSPHSKAQNQQ

SEQ ID NO: 1322 - protein, 16 aa, synthetic construct
TINGSGSPHSKNQWQQ

SEQ ID NO: 1323 - protein, 16 aa, synthetic construct
ETAGSGSPHSKAQNQQ

SEQ ID NO: 1324 - protein, 16 aa, synthetic construct
TINGSGSPHSKAQRMN

SEQ ID NO: 1325 - protein, 16 aa, synthetic construct
NNLGSGSPHSKAQNQQ

SEQ ID NO: 1326 - protein, 16 aa, synthetic construct
TINGSGSPHAKAQNHQ

SEQ ID NO: 1327 - protein, 16 aa, synthetic construct
TIIKNGSPHSKAQNQQ

SEQ ID NO: 1328 - DNA, 21 bp, synthetic construct
  source 1..21: mol_type = other DNA
gcaggtcctcactttaatgcc

SEQ ID NO: 1329 - DNA, 21 bp, synthetic construct
  source 1..21: mol_type = other DNA
ggcaatgtgactgctggcccc

SEQ ID NO: 1330 - DNA, 21 bp, synthetic construct
  source 1..21: mol_type = other DNA
gcaggtcctcactttaattcc

SEQ ID NO: 1331 - DNA, 21 bp, synthetic construct
  source 1..21: mol_type = other DNA
caggtcctcactttaatcgct

SEQ ID NO: 1332 - DNA, 21 bp, synthetic construct
  source 1..21: mol_type = other DNA
ggcaatgtgactgctggtgcc

SEQ ID NO: 1333 - DNA, 21 bp, synthetic construct
  source 1..21: mol_type = other DNA
gtcgtttggcttgtggtggct

SEQ ID NO: 1334 - DNA, 21 bp, synthetic construct
  source 1..21: mol_type = other DNA
tcgtttggcttgtggtgtgct

SEQ ID NO: 1335 - DNA, 21 bp, synthetic construct
  source 1..21: mol_type = other DNA
gcaggtcctcactttaatccc

SEQ ID NO: 1336 - DNA, 21 bp, synthetic construct
  source 1..21: mol_type = other DNA
ggcaatgtgactgctggtacc

SEQ ID NO: 1337 - DNA, 21 bp, synthetic construct
  source 1..21: mol_type = other DNA
gcaggtcctgactttaatccc

SEQ ID NO: 1338 - DNA, 21 bp, synthetic construct
  source 1..21: mol_type = other DNA
ggcaatgtgtctgctggtacc

SEQ ID NO: 1339 - DNA, 21 bp, synthetic construct
  source 1..21: mol_type = other DNA
gcaggtcctcactttaatccc

SEQ ID NO: 1340 - DNA, 21 bp, synthetic construct
  source 1..21: mol_type = other DNA
ggcaatgtgactgctggtacc

SEQ ID NO: 1341 - DNA, 21 bp, synthetic construct
  source 1..21: mol_type = other DNA
gcaggtcctcactttaatccc

SEQ ID NO: 1342 - DNA, 21 bp, synthetic construct
  source 1..21: mol_type = other DNA
gcaggtcctcactttaatgcc

SEQ ID NO: 1343 - DNA, 21 bp, synthetic construct
  source 1..21: mol_type = other DNA
caggtcctcactttaatcgcc

SEQ ID NO: 1344 - DNA, 21 bp, synthetic construct
  source 1..21: mol_type = other DNA
ggcaatgtgactgctggtacc

SEQ ID NO: 1345 - DNA, 21 bp, synthetic construct
  source 1..21: mol_type = other DNA
gtcgtttggcttgtggtggcc

SEQ ID NO: 1346 - DNA, 21 bp, synthetic construct
  source 1..21: mol_type = other DNA
tcgtttggcttgtggtgtgcc

SEQ ID NO: 1347 - DNA, 21 bp, synthetic construct
  source 1..21: mol_type = other DNA
ccccttaactcatttgttccc

SEQ ID NO: 1348 - DNA, 21 bp, synthetic construct
  source 1..21: mol_type = other DNA
gattaaagtgaggacctgctt

SEQ ID NO: 1349 - DNA, 21 bp, synthetic construct
  source 1..21: mol_type = other DNA
tgccagcagtcacattgcctt

SEQ ID NO: 1350 - DNA, 21 bp, synthetic construct
  source 1..21: mol_type = other DNA
gattaaagtgaggacctgctt

SEQ ID NO: 1351 - DNA, 21 bp, synthetic construct
  source 1..21: mol_type = other DNA
tattaaagtgaggacctgctt

SEQ ID NO: 1352 - DNA, 21 bp, synthetic construct
  source 1..21: mol_type = other DNA
tgattaaagtgaggacctgtt

SEQ ID NO: 1353 - DNA, 21 bp, synthetic construct
  source 1..21: mol_type = other DNA
tgccagcagtcacattgcctt

SEQ ID NO: 1354 - DNA, 21 bp, synthetic construct
  source 1..21: mol_type = other DNA
tcaccacaagccaaacgactt

SEQ ID NO: 1355 - DNA, 21 bp, synthetic construct
  source 1..21: mol_type = other DNA
tacaccacaagccaaacgatt

SEQ ID NO: 1356 - DNA, 21 bp, synthetic construct
  source 1..21: mol_type = other DNA
gattaaagtgaggacctgctt

SEQ ID NO: 1357 - DNA, 21 bp, synthetic construct
  source 1..21: mol_type = other DNA
tgccagcagtcacattgcctt

SEQ ID NO: 1358 - DNA, 21 bp, synthetic construct
  source 1..21: mol_type = other DNA
gattaaagtgaggacctgctt

SEQ ID NO: 1359 - DNA, 21 bp, synthetic construct
  source 1..21: mol_type = other DNA
tgccagcagtcacattgcctt

SEQ ID NO: 1360 - DNA, 21 bp, synthetic construct
  source 1..21: mol_type = other DNA
gattaaagtgaggacctgctt

SEQ ID NO: 1361 - DNA, 21 bp, synthetic construct
  source 1..21: mol_type = other DNA
tgccagcagtcacattgcctt

SEQ ID NO: 1362 - DNA, 21 bp, synthetic construct
  source 1..21: mol_type = other DNA
gattaaagtgaggacctgctt

SEQ ID NO: 1363 - DNA, 21 bp, synthetic construct
  source 1..21: mol_type = other DNA
tattaaagtgaggacctgctt

SEQ ID NO: 1364 - DNA, 21 bp, synthetic construct
  source 1..21: mol_type = other DNA
tgattaaagtgaggacctgtt

SEQ ID NO: 1365 - DNA, 21 bp, synthetic construct
  source 1..21: mol_type = other DNA
tgccagcagtcacattgcctt

SEQ ID NO: 1366 - DNA, 22 bp, synthetic construct
  source 1..22: mol_type = other DNA
tcaccacaagccaaacgacttt

SEQ ID NO: 1367 - DNA, 21 bp, synthetic construct
  source 1..21: mol_type = other DNA
tacaccacaagccaaacgatt

SEQ ID NO: 1368 - DNA, 21 bp, synthetic construct
  source 1..21: mol_type = other DNA
taacagatgagttaaggggtt

SEQ ID NO: 1369 - protein, 9 aa, synthetic construct
GSGSPHSKA

SEQ ID NO: 1370 - protein, 9 aa, synthetic construct
GHDSPHKSG

SEQ ID NO: 1371 - protein, 4 aa, synthetic construct
SPHS

SEQ ID NO: 1372 - protein, 5 aa, synthetic construct
SPHSK

SEQ ID NO: 1373 - protein, 4 aa, synthetic construct
HDSP

SEQ ID NO: 1374 - protein, 5 aa, synthetic construct
HDSPH

SEQ ID NO: 1375 - protein, 5 aa, synthetic construct
SPHKS

SEQ ID NO: 1376 - protein, 5 aa, synthetic construct
SPHAR

SEQ ID NO: 1377 - protein, 5 aa, synthetic construct
SPHVK

SEQ ID NO: 1378 - protein, 5 aa, synthetic construct
SPHAS

SEQ ID NO: 1379 - protein, 5 aa, synthetic construct
SPHKK

SEQ ID NO: 1380 - protein, 5 aa, synthetic construct
SPHVR

SEQ ID NO: 1381 - protein, 5 aa, synthetic construct
SPHRK

SEQ ID NO: 1382 - protein, 5 aa, synthetic construct
SPHKT

SEQ ID NO: 1383 - protein, 5 aa, synthetic construct
SPHKF

SEQ ID NO: 1384 - protein, 5 aa, synthetic construct
SPHKI

SEQ ID NO: 1385 - protein, 5 aa, synthetic construct
SPHKL

SEQ ID NO: 1386 - protein, 5 aa, synthetic construct
SPHKY

SEQ ID NO: 1387 - protein, 5 aa, synthetic construct
SPHTR

SEQ ID NO: 1388 - protein, 5 aa, synthetic construct
SPHKR

SEQ ID NO: 1389 - protein, 5 aa, synthetic construct
SPHGA

SEQ ID NO: 1390 - protein, 5 aa, synthetic construct
SPHSR

SEQ ID NO: 1391 - protein, 5 aa, synthetic construct
SPHSL

SEQ ID NO: 1392 - protein, 5 aa, synthetic construct
SPHSS

SEQ ID NO: 1393 - protein, 5 aa, synthetic construct
SPHFL

SEQ ID NO: 1394 - protein, 5 aa, synthetic construct
SPHWK

SEQ ID NO: 1395 - protein, 5 aa, synthetic construct
SPHGK

SEQ ID NO: 1396 - protein, 5 aa, synthetic construct
SPHTK

SEQ ID NO: 1397 - protein, 5 aa, synthetic construct
SPHNK

SEQ ID NO: 1398 - protein, 5 aa, synthetic construct
SPHAK

SEQ ID NO: 1399 - protein, 5 aa, synthetic construct
SPHKH

SEQ ID NO: 1400 - protein, 5 aa, synthetic construct
SPHKM

SEQ ID NO: 1401 - protein, 5 aa, synthetic construct
SPHRS

SEQ ID NO: 1402 - protein, 6 aa, synthetic construct
SPHSKS

SEQ ID NO: 1403 - protein, 6 aa, synthetic construct
SPHSKT

SEQ ID NO: 1404 - protein, 6 aa, synthetic construct
SPHSKG

SEQ ID NO: 1405 - protein, 6 aa, synthetic construct
SPHGKA

SEQ ID NO: 1406 - protein, 6 aa, synthetic construct
SPHNKA

SEQ ID NO: 1407 - protein, 6 aa, synthetic construct
SPHSKN

SEQ ID NO: 1408 - protein, 6 aa, synthetic construct
SPHAKA

SEQ ID NO: 1409 - protein, 6 aa, synthetic construct
SPHSKV

SEQ ID NO: 1410 - protein, 6 aa, synthetic construct
SPHKTG

SEQ ID NO: 1411 - protein, 6 aa, synthetic construct
SPHTKA

SEQ ID NO: 1412 - protein, 6 aa, synthetic construct
SPHKSL

SEQ ID NO: 1413 - protein, 6 aa, synthetic construct
SPHKSE

SEQ ID NO: 1414 - protein, 6 aa, synthetic construct
SPHKSV

SEQ ID NO: 1415 - protein, 6 aa, synthetic construct
SPHKSW

SEQ ID NO: 1416 - protein, 6 aa, synthetic construct
SPHKSN

SEQ ID NO: 1417 - protein, 6 aa, synthetic construct
SPHKHG

SEQ ID NO: 1418 - protein, 6 aa, synthetic construct
SPHKSQ

SEQ ID NO: 1419 - protein, 6 aa, synthetic construct
SPHKSK

SEQ ID NO: 1420 - protein, 6 aa, synthetic construct
SPHKLW

SEQ ID NO: 1421 - protein, 6 aa, synthetic construct
SPHWKG

SEQ ID NO: 1422 - protein, 6 aa, synthetic construct
SPHKMG

SEQ ID NO: 1423 - protein, 6 aa, synthetic construct
SPHKMA

SEQ ID NO: 1424 - protein, 5 aa, synthetic construct
SGSPH

SEQ ID NO: 1425 - protein, 5 aa, synthetic construct
QDSPH

SEQ ID NO: 1426 - protein, 5 aa, synthetic construct
RGSPH

SEQ ID NO: 1427 - protein, 5 aa, synthetic construct
SHSPH

SEQ ID NO: 1428 - protein, 5 aa, synthetic construct
QSSPH

SEQ ID NO: 1429 - protein, 5 aa, synthetic construct
DDSPH

SEQ ID NO: 1430 - protein, 5 aa, synthetic construct
HESPH

SEQ ID NO: 1431 - protein, 5 aa, synthetic construct
NYSPH

SEQ ID NO: 1432 - protein, 5 aa, synthetic construct
VGSPH

SEQ ID NO: 1433 - protein, 5 aa, synthetic construct
SCSPH

SEQ ID NO: 1434 - protein, 5 aa, synthetic construct
LLSPH

SEQ ID NO: 1435 - protein, 5 aa, synthetic construct
NGSPH

SEQ ID NO: 1436 - protein, 5 aa, synthetic construct
PGSPH

SEQ ID NO: 1437 - protein, 5 aa, synthetic construct
GGSPH

SEQ ID NO: 1438 - protein, 5 aa, synthetic construct
TGSPH

SEQ ID NO: 1439 - protein, 5 aa, synthetic construct
SVSPH

SEQ ID NO: 1440 - protein, 5 aa, synthetic construct
IGSPH

SEQ ID NO: 1441 - protein, 5 aa, synthetic construct
DGSPH

SEQ ID NO: 1442 - protein, 5 aa, synthetic construct
LGSPH

SEQ ID NO: 1443 - protein, 5 aa, synthetic construct
AGSPH

SEQ ID NO: 1444 - protein, 5 aa, synthetic construct
EGSPH

SEQ ID NO: 1445 - protein, 5 aa, synthetic construct
SASPH

SEQ ID NO: 1446 - protein, 5 aa, synthetic construct
YDSPH

SEQ ID NO: 1447 - protein, 5 aa, synthetic construct
HGSPH

SEQ ID NO: 1448 - protein, 5 aa, synthetic construct
RDSPH

SEQ ID NO: 1449 - protein, 5 aa, synthetic construct
NDSPH

SEQ ID NO: 1450 - protein, 5 aa, synthetic construct
PDSPH

SEQ ID NO: 1451 - protein, 5 aa, synthetic construct
MGSPH

SEQ ID NO: 1452 - protein, 5 aa, synthetic construct
QVSPH

SEQ ID NO: 1453 - protein, 5 aa, synthetic construct
HNSPH

SEQ ID NO: 1454 - protein, 5 aa, synthetic construct
HPSPH

SEQ ID NO: 1455 - protein, 5 aa, synthetic construct
HSSPH

SEQ ID NO: 1456 - protein, 6 aa, synthetic construct
GSGSPH

SEQ ID NO: 1457 - protein, 6 aa, synthetic construct
GHDSPH

SEQ ID NO: 1458 - protein, 6 aa, synthetic construct
GQDSPH

SEQ ID NO: 1459 - protein, 6 aa, synthetic construct
VSGSPH

SEQ ID NO: 1460 - protein, 6 aa, synthetic construct
CSGSPH

SEQ ID NO: 1461 - protein, 6 aa, synthetic construct
GRGSPH

SEQ ID NO: 1462 - protein, 6 aa, synthetic construct
CSHSPH

SEQ ID NO: 1463 - protein, 6 aa, synthetic construct
GQSSPH

SEQ ID NO: 1464 - protein, 6 aa, synthetic construct
GSHSPH

SEQ ID NO: 1465 - protein, 6 aa, synthetic construct
GDDSPH

SEQ ID NO: 1466 - protein, 6 aa, synthetic construct
GHESPH

SEQ ID NO: 1467 - protein, 6 aa, synthetic construct
GNYSPH

SEQ ID NO: 1468 - protein, 6 aa, synthetic construct
RVGSPH

SEQ ID NO: 1469 - protein, 6 aa, synthetic construct
GSCSPH

SEQ ID NO: 1470 - protein, 6 aa, synthetic construct
GLLSPH

SEQ ID NO: 1471 - protein, 6 aa, synthetic construct
MSGSPH

SEQ ID NO: 1472 - protein, 6 aa, synthetic construct
RNGSPH

SEQ ID NO: 1473 - protein, 6 aa, synthetic construct
TSGSPH

SEQ ID NO: 1474 - protein, 6 aa, synthetic construct
ISGSPH

SEQ ID NO: 1475 - protein, 6 aa, synthetic construct
GPGSPH

SEQ ID NO: 1476 - protein, 6 aa, synthetic construct
ESGSPH

SEQ ID NO: 1477 - protein, 6 aa, synthetic construct
SSGSPH

SEQ ID NO: 1478 - protein, 6 aa, synthetic construct
GNGSPH

SEQ ID NO: 1479 - protein, 6 aa, synthetic construct
ASGSPH

SEQ ID NO: 1480 - protein, 6 aa, synthetic construct
NSGSPH

SEQ ID NO: 1481 - protein, 6 aa, synthetic construct
LSGSPH

SEQ ID NO: 1482 - protein, 6 aa, synthetic construct
GGGSPH

SEQ ID NO: 1483 - protein, 6 aa, synthetic construct
KSGSPH

SEQ ID NO: 1484 - protein, 6 aa, synthetic construct
HSGSPH

SEQ ID NO: 1485 - protein, 6 aa, synthetic construct
GTGSPH

SEQ ID NO: 1486 - protein, 6 aa, synthetic construct
PSGSPH

SEQ ID NO: 1487 - protein, 6 aa, synthetic construct
GSVSPH

SEQ ID NO: 1488 - protein, 6 aa, synthetic construct
RSGSPH

SEQ ID NO: 1489 - protein, 6 aa, synthetic construct
GIGSPH

SEQ ID NO: 1490 - protein, 6 aa, synthetic construct
WSGSPH

SEQ ID NO: 1491 - protein, 6 aa, synthetic construct
DSGSPH

SEQ ID NO: 1492 - protein, 6 aa, synthetic construct
IDGSPH

SEQ ID NO: 1493 - protein, 6 aa, synthetic construct
GLGSPH

SEQ ID NO: 1494 - protein, 6 aa, synthetic construct
DAGSPH

SEQ ID NO: 1495 - protein, 6 aa, synthetic construct
DGGSPH

SEQ ID NO: 1496 - protein, 6 aa, synthetic construct
MEGSPH

SEQ ID NO: 1497 - protein, 6 aa, synthetic construct
ENGSPH

SEQ ID NO: 1498 - protein, 6 aa, synthetic construct
GSASPH

SEQ ID NO: 1499 - protein, 6 aa, synthetic construct
KNGSPH

SEQ ID NO: 1500 - protein, 6 aa, synthetic construct
KEGSPH

SEQ ID NO: 1501 - protein, 6 aa, synthetic construct
AIGSPH

SEQ ID NO: 1502 - protein, 6 aa, synthetic construct
GYDSPH

SEQ ID NO: 1503 - protein, 6 aa, synthetic construct
GHGSPH

SEQ ID NO: 1504 - protein, 6 aa, synthetic construct
GRDSPH

SEQ ID NO: 1505 - protein, 6 aa, synthetic construct
GNDSPH

SEQ ID NO: 1506 - protein, 6 aa, synthetic construct
GPDSPH

SEQ ID NO: 1507 - protein, 6 aa, synthetic construct
GMGSPH

SEQ ID NO: 1508 - protein, 6 aa, synthetic construct
GQVSPH

SEQ ID NO: 1509 - protein, 6 aa, synthetic construct
GHNSPH

SEQ ID NO: 1510 - protein, 6 aa, synthetic construct
GHPSPH

SEQ ID NO: 1511 - protein, 6 aa, synthetic construct
GHSSPH

SEQ ID NO: 1512 - protein, 7 aa, synthetic construct
SGSPHSK

SEQ ID NO: 1513 - protein, 7 aa, synthetic construct
HDSPHKS

SEQ ID NO: 1514 - protein, 7 aa, synthetic construct
SGSPHAR

SEQ ID NO: 1515 - protein, 7 aa, synthetic construct
SGSPHVK

SEQ ID NO: 1516 - protein, 7 aa, synthetic construct
QDSPHKS

SEQ ID NO: 1517 - protein, 7 aa, synthetic construct
SGSPHKK

SEQ ID NO: 1518 - protein, 7 aa, synthetic construct
SGSPHVR

SEQ ID NO: 1519 - protein, 7 aa, synthetic construct
SGSPHAS

SEQ ID NO: 1520 - protein, 7 aa, synthetic construct
SGSPHRK

SEQ ID NO: 1521 - protein, 7 aa, synthetic construct
SGSPHKT

SEQ ID NO: 1522 - protein, 7 aa, synthetic construct
SHSPHKS

SEQ ID NO: 1523 - protein, 7 aa, synthetic construct
QSSPHRS

SEQ ID NO: 1524 - protein, 7 aa, synthetic construct
RGSPHAS

SEQ ID NO: 1525 - protein, 7 aa, synthetic construct
RGSPHSK

SEQ ID NO: 1526 - protein, 7 aa, synthetic construct
SGSPHKF

SEQ ID NO: 1527 - protein, 7 aa, synthetic construct
SGSPHKI

SEQ ID NO: 1528 - protein, 7 aa, synthetic construct
SGSPHKL

SEQ ID NO: 1529 - protein, 7 aa, synthetic construct
SGSPHKY

SEQ ID NO: 1530 - protein, 7 aa, synthetic construct
SGSPHTR

SEQ ID NO: 1531 - protein, 7 aa, synthetic construct
SHSPHKR

SEQ ID NO: 1532 - protein, 7 aa, synthetic construct
SGSPHGA

SEQ ID NO: 1533 - protein, 7 aa, synthetic construct
HDSPHKR

SEQ ID NO: 1534 - protein, 7 aa, synthetic construct
DDSPHKS

SEQ ID NO: 1535 - protein, 7 aa, synthetic construct
HESPHKS

SEQ ID NO: 1536 - protein, 7 aa, synthetic construct
NYSPHKI

SEQ ID NO: 1537 - protein, 7 aa, synthetic construct
SGSPHSR

SEQ ID NO: 1538 - protein, 7 aa, synthetic construct
SGSPHSL

SEQ ID NO: 1539 - protein, 7 aa, synthetic construct
SGSPHSS

SEQ ID NO: 1540 - protein, 7 aa, synthetic construct
VGSPHSK

SEQ ID NO: 1541 - protein, 7 aa, synthetic construct
SCSPHRK

SEQ ID NO: 1542 - protein, 7 aa, synthetic construct
SGSPHFL

SEQ ID NO: 1543 - protein, 7 aa, synthetic construct
LLSPHWK

SEQ ID NO: 1544 - protein, 7 aa, synthetic construct
NGSPHSK

SEQ ID NO: 1545 - protein, 7 aa, synthetic construct
PGSPHSK

SEQ ID NO: 1546 - protein, 7 aa, synthetic construct
GGSPHSK

SEQ ID NO: 1547 - protein, 7 aa, synthetic construct
TGSPHSK

SEQ ID NO: 1548 - protein, 7 aa, synthetic construct
SVSPHGK

SEQ ID NO: 1549 - protein, 7 aa, synthetic construct
SGSPHTK

SEQ ID NO: 1550 - protein, 7 aa, synthetic construct
IGSPHSK

SEQ ID NO: 1551 - protein, 7 aa, synthetic construct
DGSPHSK

SEQ ID NO: 1552 - protein, 7 aa, synthetic construct
SGSPHNK

SEQ ID NO: 1553 - protein, 7 aa, synthetic construct
LGSPHSK

SEQ ID NO: 1554 - protein, 7 aa, synthetic construct
AGSPHSK

SEQ ID NO: 1555 - protein, 7 aa, synthetic construct
EGSPHSK

SEQ ID NO: 1556 - protein, 7 aa, synthetic construct
SASPHSK

SEQ ID NO: 1557 - protein, 7 aa, synthetic construct
SGSPHAK

SEQ ID NO: 1558 - protein, 7 aa, synthetic construct
HDSPHKI

SEQ ID NO: 1559 - protein, 7 aa, synthetic construct
YDSPHKS

SEQ ID NO: 1560 - protein, 7 aa, synthetic construct
HDSPHKT

SEQ ID NO: 1561 - protein, 7 aa, synthetic construct
RGSPHKR

SEQ ID NO: 1562 - protein, 7 aa, synthetic construct
HGSPHSK

SEQ ID NO: 1563 - protein, 7 aa, synthetic construct
RDSPHKS

SEQ ID NO: 1564 - protein, 7 aa, synthetic construct
NDSPHKS

SEQ ID NO: 1565 - protein, 7 aa, synthetic construct
QDSPHKI

SEQ ID NO: 1566 - protein, 7 aa, synthetic construct
PDSPHKI

SEQ ID NO: 1567 - protein, 7 aa, synthetic construct
PDSPHKS

SEQ ID NO: 1568 - protein, 7 aa, synthetic construct
MGSPHSK

SEQ ID NO: 1569 - protein, 7 aa, synthetic construct
HDSPHKH

SEQ ID NO: 1570 - protein, 7 aa, synthetic construct
QVSPHKS

SEQ ID NO: 1571 - protein, 7 aa, synthetic construct
HNSPHKS

SEQ ID NO: 1572 - protein, 7 aa, synthetic construct
NGSPHKR

SEQ ID NO: 1573 - protein, 7 aa, synthetic construct
HDSPHKY

SEQ ID NO: 1574 - protein, 7 aa, synthetic construct
NDSPHKI

SEQ ID NO: 1575 - protein, 7 aa, synthetic construct
HDSPHKL

SEQ ID NO: 1576 - protein, 7 aa, synthetic construct
HPSPHWK

SEQ ID NO: 1577 - protein, 7 aa, synthetic construct
HDSPHKM

SEQ ID NO: 1578 - protein, 7 aa, synthetic construct
HSSPHRS

SEQ ID NO: 1579 - protein, 9 aa, synthetic construct
GSGSPHARM

SEQ ID NO: 1580 - protein, 9 aa, synthetic construct
GSGSPHVKS

SEQ ID NO: 1581 - protein, 9 aa, synthetic construct
GQDSPHKSG

SEQ ID NO: 1582 - protein, 9 aa, synthetic construct
GSGSPHASR

SEQ ID NO: 1583 - protein, 9 aa, synthetic construct
GSGSPHVKI

SEQ ID NO: 1584 - protein, 9 aa, synthetic construct
GSGSPHKKN

SEQ ID NO: 1585 - protein, 9 aa, synthetic construct
GSGSPHVRM

SEQ ID NO: 1586 - protein, 9 aa, synthetic construct
VSGSPHSKA

SEQ ID NO: 1587 - protein, 9 aa, synthetic construct
CSGSPHSKA

SEQ ID NO: 1588 - protein, 9 aa, synthetic construct
GSGSPHRKA

SEQ ID NO: 1589 - protein, 9 aa, synthetic construct
CSGSPHKTS

SEQ ID NO: 1590 - protein, 9 aa, synthetic construct
CSHSPHKSG

SEQ ID NO: 1591 - protein, 9 aa, synthetic construct
GQSSPHRSG

SEQ ID NO: 1592 - protein, 9 aa, synthetic construct
GRGSPHASR

SEQ ID NO: 1593 - protein, 9 aa, synthetic construct
GRGSPHSKA

SEQ ID NO: 1594 - protein, 9 aa, synthetic construct
GSGSPHKFG

SEQ ID NO: 1595 - protein, 9 aa, synthetic construct
GSGSPHKIG

SEQ ID NO: 1596 - protein, 9 aa, synthetic construct
GSGSPHKLG

SEQ ID NO: 1597 - protein, 9 aa, synthetic construct
GSGSPHKTS

SEQ ID NO: 1598 - protein, 9 aa, synthetic construct
GSGSPHKTT

SEQ ID NO: 1599 - protein, 9 aa, synthetic construct
GSGSPHKTY

SEQ ID NO: 1600 - protein, 9 aa, synthetic construct
GSGSPHKYG

SEQ ID NO: 1601 - protein, 9 aa, synthetic construct
GSGSPHSKD

SEQ ID NO: 1602 - protein, 9 aa, synthetic construct
GSGSPHSKP

SEQ ID NO: 1603 - protein, 9 aa, synthetic construct
GSGSPHTRG

SEQ ID NO: 1604 - protein, 9 aa, synthetic construct
GSGSPHVRG

SEQ ID NO: 1605 - protein, 9 aa, synthetic construct
GSHSPHKRG

SEQ ID NO: 1606 - protein, 9 aa, synthetic construct
GSHSPHKSG

SEQ ID NO: 1607 - protein, 9 aa, synthetic construct
VSGSPHASR

SEQ ID NO: 1608 - protein, 9 aa, synthetic construct
VSGSPHGAR

SEQ ID NO: 1609 - protein, 9 aa, synthetic construct
VSGSPHKFG

SEQ ID NO: 1610 - protein, 9 aa, synthetic construct
GHDSPHKRG

SEQ ID NO: 1611 - protein, 9 aa, synthetic construct
GDDSPHKSG

SEQ ID NO: 1612 - protein, 9 aa, synthetic construct
GHESPHKSA

SEQ ID NO: 1613 - protein, 9 aa, synthetic construct
GHDSPHKSA

SEQ ID NO: 1614 - protein, 9 aa, synthetic construct
GNYSPHKIG

SEQ ID NO: 1615 - protein, 9 aa, synthetic construct
GHDSPHKSR

SEQ ID NO: 1616 - protein, 9 aa, synthetic construct
GSGSPHSKL

SEQ ID NO: 1617 - protein, 9 aa, synthetic construct
GSGSPHSRA

SEQ ID NO: 1618 - protein, 9 aa, synthetic construct
GSGSPHSKR

SEQ ID NO: 1619 - protein, 9 aa, synthetic construct
GSGSPHSLR

SEQ ID NO: 1620 - protein, 9 aa, synthetic construct
GSGSPHSRG

SEQ ID NO: 1621 - protein, 9 aa, synthetic construct
GSGSPHSSR

SEQ ID NO: 1622 - protein, 9 aa, synthetic construct
RVGSPHSKA

SEQ ID NO: 1623 - protein, 9 aa, synthetic construct
GSCSPHRKA

SEQ ID NO: 1624 - protein, 9 aa, synthetic construct
GSGSPHFLR

SEQ ID NO: 1625 - protein, 9 aa, synthetic construct
GSGSPHSKW

SEQ ID NO: 1626 - protein, 9 aa, synthetic construct
GSGSPHSKS

SEQ ID NO: 1627 - protein, 9 aa, synthetic construct
GLLSPHWKA

SEQ ID NO: 1628 - protein, 9 aa, synthetic construct
GSGSPHVRR

SEQ ID NO: 1629 - protein, 9 aa, synthetic construct
GSGSPHSKV

SEQ ID NO: 1630 - protein, 9 aa, synthetic construct
MSGSPHSKA

SEQ ID NO: 1631 - protein, 9 aa, synthetic construct
RNGSPHSKA

SEQ ID NO: 1632 - protein, 9 aa, synthetic construct
TSGSPHSKA

SEQ ID NO: 1633 - protein, 9 aa, synthetic construct
ISGSPHSKA

SEQ ID NO: 1634 - protein, 9 aa, synthetic construct
GPGSPHSKA

SEQ ID NO: 1635 - protein, 9 aa, synthetic construct
GSGSPHSKT

SEQ ID NO: 1636 - protein, 9 aa, synthetic construct
ESGSPHSKA

SEQ ID NO: 1637 - protein, 9 aa, synthetic construct
SSGSPHSKA

SEQ ID NO: 1638 - protein, 9 aa, synthetic construct
GNGSPHSKA

SEQ ID NO: 1639 - protein, 9 aa, synthetic construct
ASGSPHSKA

SEQ ID NO: 1640 - protein, 9 aa, synthetic construct
NSGSPHSKA

SEQ ID NO: 1641 - protein, 9 aa, synthetic construct
LSGSPHSKA

SEQ ID NO: 1642 - protein, 9 aa, synthetic construct
GGGSPHSKA

SEQ ID NO: 1643 - protein, 9 aa, synthetic construct
KSGSPHSKA

SEQ ID NO: 1644 - protein, 9 aa, synthetic construct
GGGSPHSKS

SEQ ID NO: 1645 - protein, 9 aa, synthetic construct
GSGSPHSKG

SEQ ID NO: 1646 - protein, 9 aa, synthetic construct
HSGSPHSKA

SEQ ID NO: 1647 - protein, 9 aa, synthetic construct
GTGSPHSKA

SEQ ID NO: 1648 - protein, 9 aa, synthetic construct
PSGSPHSKA

SEQ ID NO: 1649 - protein, 9 aa, synthetic construct
GSVSPHGKA

SEQ ID NO: 1650 - protein, 9 aa, synthetic construct
RSGSPHSKA

SEQ ID NO: 1651 - protein, 9 aa, synthetic construct
GSGSPHTKA

SEQ ID NO: 1652 - protein, 9 aa, synthetic construct
GIGSPHSKA

SEQ ID NO: 1653 - protein, 9 aa, synthetic construct
WSGSPHSKA

SEQ ID NO: 1654 - protein, 9 aa, synthetic construct
DSGSPHSKA

SEQ ID NO: 1655 - protein, 9 aa, synthetic construct
IDGSPHSKA

SEQ ID NO: 1656 - protein, 9 aa, synthetic construct
GSGSPHNKA

SEQ ID NO: 1657 - protein, 9 aa, synthetic construct
GLGSPHSKS

SEQ ID NO: 1658 - protein, 9 aa, synthetic construct
DAGSPHSKA

SEQ ID NO: 1659 - protein, 9 aa, synthetic construct
DGGSPHSKA

SEQ ID NO: 1660 - protein, 9 aa, synthetic construct
MEGSPHSKA

SEQ ID NO: 1661 - protein, 9 aa, synthetic construct
ENGSPHSKA

SEQ ID NO: 1662 - protein, 9 aa, synthetic construct
GSASPHSKA

SEQ ID NO: 1663 - protein, 9 aa, synthetic construct
GNGSPHSKS

SEQ ID NO: 1664 - protein, 9 aa, synthetic construct
KNGSPHSKA

SEQ ID NO: 1665 - protein, 9 aa, synthetic construct
KEGSPHSKA

SEQ ID NO: 1666 - protein, 9 aa, synthetic construct
AIGSPHSKA

SEQ ID NO: 1667 - protein, 9 aa, synthetic construct
GSGSPHSKN

SEQ ID NO: 1668 - protein, 9 aa, synthetic construct
GSGSPHAKA

SEQ ID NO: 1669 - protein, 9 aa, synthetic construct
GHDSPHKIG

SEQ ID NO: 1670 - protein, 9 aa, synthetic construct
GYDSPHKSG

SEQ ID NO: 1671 - protein, 9 aa, synthetic construct
GHESPHKSG

SEQ ID NO: 1672 - protein, 9 aa, synthetic construct
GHDSPHKTG

SEQ ID NO: 1673 - protein, 9 aa, synthetic construct
GRGSPHKRG

SEQ ID NO: 1674 - protein, 9 aa, synthetic construct
GHDSPHKSL

SEQ ID NO: 1675 - protein, 9 aa, synthetic construct
GHGSPHSKA

SEQ ID NO: 1676 - protein, 9 aa, synthetic construct
GHDSPHKSE

SEQ ID NO: 1677 - protein, 9 aa, synthetic construct
GRDSPHKSG

SEQ ID NO: 1678 - protein, 9 aa, synthetic construct
GNDSPHKSV

SEQ ID NO: 1679 - protein, 9 aa, synthetic construct
GQDSPHKIG

SEQ ID NO: 1680 - protein, 9 aa, synthetic construct
GHDSPHKSV

SEQ ID NO: 1681 - protein, 9 aa, synthetic construct
GPDSPHKIG

SEQ ID NO: 1682 - protein, 9 aa, synthetic construct
GPDSPHKSG

SEQ ID NO: 1683 - protein, 9 aa, synthetic construct
GHDSPHKSW

SEQ ID NO: 1684 - protein, 9 aa, synthetic construct
GHDSPHKSN

SEQ ID NO: 1685 - protein, 9 aa, synthetic construct
GMGSPHSKT

SEQ ID NO: 1686 - protein, 9 aa, synthetic construct
GHDSPHKHG

SEQ ID NO: 1687 - protein, 9 aa, synthetic construct
GQVSPHKSG

SEQ ID NO: 1688 - protein, 9 aa, synthetic construct
GDDSPHKSV

SEQ ID NO: 1689 - protein, 9 aa, synthetic construct
GHNSPHKSG

SEQ ID NO: 1690 - protein, 9 aa, synthetic construct
GNGSPHKRG

SEQ ID NO: 1691 - protein, 9 aa, synthetic construct
GHDSPHKYG

SEQ ID NO: 1692 - protein, 9 aa, synthetic construct
GHDSPHKSQ

SEQ ID NO: 1693 - protein, 9 aa, synthetic construct
GNDSPHKIG

SEQ ID NO: 1694 - protein, 9 aa, synthetic construct
GHDSPHKSK

SEQ ID NO: 1695 - protein, 9 aa, synthetic construct
GHDSPHKLW

SEQ ID NO: 1696 - protein, 9 aa, synthetic construct
GHPSPHWKG

SEQ ID NO: 1697 - protein, 9 aa, synthetic construct
GHDSPHKMG

SEQ ID NO: 1698 - protein, 9 aa, synthetic construct
GHDSPHKMA

SEQ ID NO: 1699 - protein, 9 aa, synthetic construct
GHSSPHRSG

SEQ ID NO: 1700 - protein, 8 aa, synthetic construct
SGSPHKYG

SEQ ID NO: 1701 - protein, 4 aa, synthetic construct
QNQQ

SEQ ID NO: 1702 - protein, 4 aa, synthetic construct
WNQQ

SEQ ID NO: 1703 - protein, 4 aa, synthetic construct
QYYV

SEQ ID NO: 1704 - protein, 4 aa, synthetic construct
RRQQ

SEQ ID NO: 1705 - protein, 4 aa, synthetic construct
GCGQ

SEQ ID NO: 1706 - protein, 4 aa, synthetic construct
LRQQ

SEQ ID NO: 1707 - protein, 4 aa, synthetic construct
RNQQ

SEQ ID NO: 1708 - protein, 4 aa, synthetic construct
VNQQ

SEQ ID NO: 1709 - protein, 4 aa, synthetic construct
FRLQ

SEQ ID NO: 1710 - protein, 4 aa, synthetic construct
FNQQ

SEQ ID NO: 1711 - protein, 4 aa, synthetic construct
LLQQ

SEQ ID NO: 1712 - protein, 4 aa, synthetic construct
SNQQ

SEQ ID NO: 1713 - protein, 4 aa, synthetic construct
RLQQ

SEQ ID NO: 1714 - protein, 4 aa, synthetic construct
LNQQ

SEQ ID NO: 1715 - protein, 4 aa, synthetic construct
QRKL

SEQ ID NO: 1716 - protein, 4 aa, synthetic construct
LRRQ

SEQ ID NO: 1717 - protein, 4 aa, synthetic construct
QRLR

SEQ ID NO: 1718 - protein, 4 aa, synthetic construct
QRRL

SEQ ID NO: 1719 - protein, 4 aa, synthetic construct
RRLQ

SEQ ID NO: 1720 - protein, 4 aa, synthetic construct
RLRQ

SEQ ID NO: 1721 - protein, 4 aa, synthetic construct
SKRQ

SEQ ID NO: 1722 - protein, 4 aa, synthetic construct
QLYR

SEQ ID NO: 1723 - protein, 4 aa, synthetic construct
QLTV

SEQ ID NO: 1724 - protein, 4 aa, synthetic construct
QNKQ

SEQ ID NO: 1725 - protein, 4 aa, synthetic construct
KNQQ

SEQ ID NO: 1726 - protein, 4 aa, synthetic construct
QKQQ

SEQ ID NO: 1727 - protein, 4 aa, synthetic construct
QTQQ

SEQ ID NO: 1728 - protein, 4 aa, synthetic construct
QNHQ

SEQ ID NO: 1729 - protein, 4 aa, synthetic construct
QHQQ

SEQ ID NO: 1730 - protein, 4 aa, synthetic construct
QNQH

SEQ ID NO: 1731 - protein, 4 aa, synthetic construct
QHRQ

SEQ ID NO: 1732 - protein, 4 aa, synthetic construct
LTQQ

SEQ ID NO: 1733 - protein, 4 aa, synthetic construct
QNQW

SEQ ID NO: 1734 - protein, 4 aa, synthetic construct
QNTH

SEQ ID NO: 1735 - protein, 4 aa, synthetic construct
RRRQ

SEQ ID NO: 1736 - protein, 4 aa, synthetic construct
QYQQ

SEQ ID NO: 1737 - protein, 4 aa, synthetic construct
QNDQ

SEQ ID NO: 1738 - protein, 4 aa, synthetic construct
QNRH

SEQ ID NO: 1739 - protein, 4 aa, synthetic construct
RDQQ

SEQ ID NO: 1740 - protein, 4 aa, synthetic construct
PNLQ

SEQ ID NO: 1741 - protein, 4 aa, synthetic construct
HVRQ

SEQ ID NO: 1742 - protein, 4 aa, synthetic construct
PNQH

SEQ ID NO: 1743 - protein, 4 aa, synthetic construct
HNQQ

SEQ ID NO: 1744 - protein, 4 aa, synthetic construct
QSQQ

SEQ ID NO: 1745 - protein, 4 aa, synthetic construct
QPAK

SEQ ID NO: 1746 - protein, 4 aa, synthetic construct
QNLA

SEQ ID NO: 1747 - protein, 4 aa, synthetic construct
QNQL

SEQ ID NO: 1748 - protein, 4 aa, synthetic construct
QGQQ

SEQ ID NO: 1749 - protein, 4 aa, synthetic construct
LNRQ

SEQ ID NO: 1750 - protein, 4 aa, synthetic construct
QNPP

SEQ ID NO: 1751 - protein, 4 aa, synthetic construct
QNLQ

SEQ ID NO: 1752 - protein, 4 aa, synthetic construct
QDQE

SEQ ID NO: 1753 - protein, 4 aa, synthetic construct
QDQQ

SEQ ID NO: 1754 - protein, 18 aa, synthetic construct
KAEIGHDSPHKSGQNQQT

SEQ ID NO: 1755 - protein, 4 aa, synthetic construct
HWQQ

SEQ ID NO: 1756 - protein, 4 aa, synthetic construct
PNQQ

SEQ ID NO: 1757 - protein, 4 aa, synthetic construct
PEQQ

SEQ ID NO: 1758 - protein, 4 aa, synthetic construct
QRTM

SEQ ID NO: 1759 - protein, 4 aa, synthetic construct
LHQH

SEQ ID NO: 1760 - protein, 4 aa, synthetic construct
QHRI

SEQ ID NO: 1761 - protein, 4 aa, synthetic construct
QYIH

SEQ ID NO: 1762 - protein, 4 aa, synthetic construct
QKFE

SEQ ID NO: 1763 - protein, 4 aa, synthetic construct
QFPS

SEQ ID NO: 1764 - protein, 4 aa, synthetic construct
QNPL

SEQ ID NO: 1765 - protein, 4 aa, synthetic construct
QAIK

SEQ ID NO: 1766 - protein, 4 aa, synthetic construct
QNRQ

SEQ ID NO: 1767 - protein, 4 aa, synthetic construct
QYQH

SEQ ID NO: 1768 - protein, 4 aa, synthetic construct
QNPQ

SEQ ID NO: 1769 - protein, 4 aa, synthetic construct
QHQL

SEQ ID NO: 1770 - protein, 4 aa, synthetic construct
QSPP

SEQ ID NO: 1771 - protein, 4 aa, synthetic construct
QAKL

SEQ ID NO: 1772 - protein, 4 aa, synthetic construct
KSQQ

SEQ ID NO: 1773 - protein, 4 aa, synthetic construct
QDRP

SEQ ID NO: 1774 - protein, 4 aa, synthetic construct
QNLG

SEQ ID NO: 1775 - protein, 4 aa, synthetic construct
QAFH

SEQ ID NO: 1776 - protein, 4 aa, synthetic construct
QNAQ

SEQ ID NO: 1777 - protein, 4 aa, synthetic construct
HNQL

SEQ ID NO: 1778 - protein, 4 aa, synthetic construct
QKLN

SEQ ID NO: 1779 - protein, 4 aa, synthetic construct
QNVQ

SEQ ID NO: 1780 - protein, 4 aa, synthetic construct
QAQQ

SEQ ID NO: 1781 - protein, 4 aa, synthetic construct
QTPP

SEQ ID NO: 1782 - protein, 4 aa, synthetic construct
QPPA

SEQ ID NO: 1783 - protein, 4 aa, synthetic construct
QERP

SEQ ID NO: 1784 - protein, 4 aa, synthetic construct
QDLQ

SEQ ID NO: 1785 - protein, 4 aa, synthetic construct
QAMH

SEQ ID NO: 1786 - protein, 4 aa, synthetic construct
QHPS

SEQ ID NO: 1787 - protein, 4 aa, synthetic construct
PGLQ

SEQ ID NO: 1788 - protein, 4 aa, synthetic construct
QGIR

SEQ ID NO: 1789 - protein, 4 aa, synthetic construct
QAPA

SEQ ID NO: 1790 - protein, 4 aa, synthetic construct
QIPP

SEQ ID NO: 1791 - protein, 4 aa, synthetic construct
QTQL

SEQ ID NO: 1792 - protein, 4 aa, synthetic construct
QAPS

SEQ ID NO: 1793 - protein, 4 aa, synthetic construct
QNTY

SEQ ID NO: 1794 - protein, 4 aa, synthetic construct
QDKQ

SEQ ID NO: 1795 - protein, 4 aa, synthetic construct
QNHL

SEQ ID NO: 1796 - protein, 4 aa, synthetic construct
QIGM

SEQ ID NO: 1797 - protein, 4 aa, synthetic construct
LNKQ

SEQ ID NO: 1798 - protein, 4 aa, synthetic construct
PNQL

SEQ ID NO: 1799 - protein, 4 aa, synthetic construct
QLQQ

SEQ ID NO: 1800 - protein, 13 aa, synthetic construct
GHDSPHKSGQNQQ

SEQ ID NO: 1801 - protein, 13 aa, synthetic construct
GSGSPHSKAQNQQ

SEQ ID NO: 1802 - protein, 13 aa, synthetic construct
GSGSPHSKAQNRH

SEQ ID NO: 1803 - protein, 13 aa, synthetic construct
GSGSPHSKVQNQQ

SEQ ID NO: 1804 - protein, 13 aa, synthetic construct
MSGSPHSKAQNQQ

SEQ ID NO: 1805 - protein, 13 aa, synthetic construct
GRGSPHSKAQNQQ

SEQ ID NO: 1806 - protein, 13 aa, synthetic construct
RNGSPHSKAQNQQ

SEQ ID NO: 1807 - protein, 13 aa, synthetic construct
GSGSPHSKARDQQ

SEQ ID NO: 1808 - protein, 13 aa, synthetic construct
GSGSPHSKAPNLQ

SEQ ID NO: 1809 - protein, 13 aa, synthetic construct
TSGSPHSKAQNQQ

SEQ ID NO: 1810 - protein, 13 aa, synthetic construct
GSGSPHSKAHVRQ

SEQ ID NO: 1811 - protein, 13 aa, synthetic construct
GSGSPHSKAPNQH

SEQ ID NO: 1812 - protein, 13 aa, synthetic construct
ISGSPHSKAQNQQ

SEQ ID NO: 1813 - protein, 13 aa, synthetic construct
GPGSPHSKAHNQQ

SEQ ID NO: 1814 - protein, 13 aa, synthetic construct
GSGSPHSKTQSQQ

SEQ ID NO: 1815 - protein, 13 aa, synthetic construct
ESGSPHSKAQNQQ

SEQ ID NO: 1816 - protein, 13 aa, synthetic construct
GSGSPHSKAQPAK

SEQ ID NO: 1817 - protein, 13 aa, synthetic construct
SSGSPHSKAQNQQ

SEQ ID NO: 1818 - protein, 13 aa, synthetic construct
GNGSPHSKAQNQQ

SEQ ID NO: 1819 - protein, 13 aa, synthetic construct
GSGSPHSKSQTQQ

SEQ ID NO: 1820 - protein, 13 aa, synthetic construct
ASGSPHSKAQNQQ

SEQ ID NO: 1821 - protein, 13 aa, synthetic construct
GSGSPHSKAQNLA

SEQ ID NO: 1822 - protein, 13 aa, synthetic construct
GSGSPHSKSQNQL

SEQ ID NO: 1823 - protein, 13 aa, synthetic construct
NSGSPHSKAQNQQ

SEQ ID NO: 1824 - protein, 13 aa, synthetic construct
GSGSPHSKAQGQQ

SEQ ID NO: 1825 - protein, 13 aa, synthetic construct
VSGSPHSKAQNQQ

SEQ ID NO: 1826 - protein, 13 aa, synthetic construct
GSGSPHSKALNRQ

SEQ ID NO: 1827 - protein, 13 aa, synthetic construct
LSGSPHSKAQNQQ

SEQ ID NO: 1828 - protein, 13 aa, synthetic construct
GSGSPHSKAHNQQ

SEQ ID NO: 1829 - protein, 13 aa, synthetic construct
GSGSPHSKTQNQQ

SEQ ID NO: 1830 - protein, 13 aa, synthetic construct
GGGSPHSKAQTQQ

SEQ ID NO: 1831 - protein, 13 aa, synthetic construct
GSGSPHSKAQNPP

SEQ ID NO: 1832 - protein, 13 aa, synthetic construct
GSGSPHSKAQNLQ

SEQ ID NO: 1833 - protein, 13 aa, synthetic construct
GGGSPHSKAQNQQ

SEQ ID NO: 1834 - protein, 13 aa, synthetic construct
GSGSPHSKAQYQQ

SEQ ID NO: 1835 - protein, 13 aa, synthetic construct
GGGSPHSKAQNKQ

SEQ ID NO: 1836 - protein, 13 aa, synthetic construct
GSGSPHSKAQDQE

SEQ ID NO: 1837 - protein, 13 aa, synthetic construct
KSGSPHSKAQNQQ

SEQ ID NO: 1838 - protein, 13 aa, synthetic construct
GGGSPHSKAQNQL

SEQ ID NO: 1839 - protein, 13 aa, synthetic construct
GSGSPHSKAQNHQ

SEQ ID NO: 1840 - protein, 13 aa, synthetic construct
GSGSPHSKAQDQQ

SEQ ID NO: 1841 - protein, 13 aa, synthetic construct
GGGSPHSKSQNQL

SEQ ID NO: 1842 - protein, 13 aa, synthetic construct
GNGSPHSKAQNKQ

SEQ ID NO: 1843 - protein, 13 aa, synthetic construct
GSGSPHSKGHWQQ

SEQ ID NO: 1844 - protein, 13 aa, synthetic construct
GSGSPHSKAPNQQ

SEQ ID NO: 1845 - protein, 13 aa, synthetic construct
GSGSPHSKAQNQL

SEQ ID NO: 1846 - protein, 13 aa, synthetic construct
GSGSPHSKRPEQQ

SEQ ID NO: 1847 - protein, 13 aa, synthetic construct
GSGSPHSKAQRTM

SEQ ID NO: 1848 - protein, 13 aa, synthetic construct
GNGSPHSKAQNQH

SEQ ID NO: 1849 - protein, 13 aa, synthetic construct
HSGSPHSKAQNQQ

SEQ ID NO: 1850 - protein, 13 aa, synthetic construct
GGGSPHSKALNQQ

SEQ ID NO: 1851 - protein, 13 aa, synthetic construct
GSGSPHSKALHQH

SEQ ID NO: 1852 - protein, 13 aa, synthetic construct
GTGSPHSKAQNHQ

SEQ ID NO: 1853 - protein, 13 aa, synthetic construct
GSGSPHSKAQHRI

SEQ ID NO: 1854 - protein, 13 aa, synthetic construct
GSGSPHSKAQYIH

SEQ ID NO: 1855 - protein, 13 aa, synthetic construct
GGGSPHSKAHNQQ

SEQ ID NO: 1856 - protein, 13 aa, synthetic construct
GSGSPHSKAQKFE

SEQ ID NO: 1857 - protein, 13 aa, synthetic construct
ESGSPHSKAQNHQ

SEQ ID NO: 1858 - protein, 13 aa, synthetic construct
GSGSPHSKAQFPS

SEQ ID NO: 1859 - protein, 13 aa, synthetic construct
PSGSPHSKAQNQQ

SEQ ID NO: 1860 - protein, 13 aa, synthetic construct
GNGSPHSKAQNPL

SEQ ID NO: 1861 - protein, 13 aa, synthetic construct
GGGSPHSKAQSQQ

SEQ ID NO: 1862 - protein, 13 aa, synthetic construct
GSGSPHSKAQAIK

SEQ ID NO: 1863 - protein, 13 aa, synthetic construct
GSGSPHSKGQNRQ

SEQ ID NO: 1864 - protein, 13 aa, synthetic construct
GSGSPHSKAQSQQ

SEQ ID NO: 1865 - protein, 13 aa, synthetic construct
GSVSPHGKAQNQL

SEQ ID NO: 1866 - protein, 13 aa, synthetic construct
ASGSPHSKAQNQL

SEQ ID NO: 1867 - protein, 13 aa, synthetic construct
RSGSPHSKAQNQQ

SEQ ID NO: 1868 - protein, 13 aa, synthetic construct
GSGSPHSKAQYQH

SEQ ID NO: 1869 - protein, 13 aa, synthetic construct
GSGSPHTKAQNPQ

SEQ ID NO: 1870 - protein, 13 aa, synthetic construct
GSGSPHSKGQNPP

SEQ ID NO: 1871 - protein, 13 aa, synthetic construct
GSGSPHSKAQHQL

SEQ ID NO: 1872 - protein, 13 aa, synthetic construct
GSGSPHSKAQSPP

SEQ ID NO: 1873 - protein, 13 aa, synthetic construct
GSGSPHSKAQAKL

SEQ ID NO: 1874 - protein, 13 aa, synthetic construct
GSGSPHSKTKSQQ

SEQ ID NO: 1875 - protein, 13 aa, synthetic construct
GSGSPHSKAQDRP

SEQ ID NO: 1876 - protein, 13 aa, synthetic construct
GIGSPHSKAQNLG

SEQ ID NO: 1877 - protein, 13 aa, synthetic construct
GSGSPHSKAQAFH

SEQ ID NO: 1878 - protein, 13 aa, synthetic construct
GSGSPHSKAQKQQ

SEQ ID NO: 1879 - protein, 13 aa, synthetic construct
GSGSPHSKAQNAQ

SEQ ID NO: 1880 - protein, 13 aa, synthetic construct
WSGSPHSKAQNQQ

SEQ ID NO: 1881 - protein, 13 aa, synthetic construct
GSGSPHSKAHNQL

SEQ ID NO: 1882 - protein, 13 aa, synthetic construct
GNGSPHSKAQNHQ

SEQ ID NO: 1883 - protein, 13 aa, synthetic construct
GGGSPHSKAQNLQ

SEQ ID NO: 1884 - protein, 13 aa, synthetic construct
GSGSPHSKAQKLN

SEQ ID NO: 1885 - protein, 13 aa, synthetic construct
GGGSPHSKSQNQH

SEQ ID NO: 1886 - protein, 13 aa, synthetic construct
GSGSPHSKSQNVQ

SEQ ID NO: 1887 - protein, 13 aa, synthetic construct
GSGSPHSKAQAQQ

SEQ ID NO: 1888 - protein, 13 aa, synthetic construct
DSGSPHSKAQNQQ

SEQ ID NO: 1889 - protein, 13 aa, synthetic construct
ASGSPHSKAPNQQ

SEQ ID NO: 1890 - protein, 13 aa, synthetic construct
GSGSPHSKAQTPP

SEQ ID NO: 1891 - protein, 13 aa, synthetic construct
IDGSPHSKAQNQQ

SEQ ID NO: 1892 - protein, 13 aa, synthetic construct
GSGSPHNKAQNHQ

SEQ ID NO: 1893 - protein, 13 aa, synthetic construct
GSGSPHSKAQPPA

SEQ ID NO: 1894 - protein, 13 aa, synthetic construct
GSGSPHSKAQERP

SEQ ID NO: 1895 - protein, 13 aa, synthetic construct
GSGSPHSKAQDLQ

SEQ ID NO: 1896 - protein, 13 aa, synthetic construct
GGGSPHSKAQNPP

SEQ ID NO: 1897 - protein, 13 aa, synthetic construct
GSGSPHSKAQAMH

SEQ ID NO: 1898 - protein, 13 aa, synthetic construct
GSGSPHSKALNQQ

SEQ ID NO: 1899 - protein, 13 aa, synthetic construct
GSGSPHSKAQHPS

SEQ ID NO: 1900 - protein, 13 aa, synthetic construct
GLGSPHSKSQNQQ

SEQ ID NO: 1901 - protein, 13 aa, synthetic construct
GTGSPHSKAQNQQ

SEQ ID NO: 1902 - protein, 13 aa, synthetic construct
GSGSPHSKAPGLQ

SEQ ID NO: 1903 - protein, 13 aa, synthetic construct
GSGSPHSKAQGIR

SEQ ID NO: 1904 - protein, 13 aa, synthetic construct
GSGSPHSKAQAPA

SEQ ID NO: 1905 - protein, 13 aa, synthetic construct
GSGSPHSKSQSQQ

SEQ ID NO: 1906 - protein, 13 aa, synthetic construct
GSGSPHSKAQIPP

SEQ ID NO: 1907 - protein, 13 aa, synthetic construct
GSGSPHSKAQTQL

SEQ ID NO: 1908 - protein, 13 aa, synthetic construct
GSGSPHSKAQAPS

SEQ ID NO: 1909 - protein, 13 aa, synthetic construct
DAGSPHSKAQNQQ

SEQ ID NO: 1910 - protein, 13 aa, synthetic construct
GSGSPHSKGQNQQ

SEQ ID NO: 1911 - protein, 13 aa, synthetic construct
DGGSPHSKAQNQQ

SEQ ID NO: 1912 - protein, 13 aa, synthetic construct
ASGSPHSKAHNQQ

SEQ ID NO: 1913 - protein, 13 aa, synthetic construct
GSGSPHSKAQNTY

SEQ ID NO: 1914 - protein, 13 aa, synthetic construct
GSGSPHSKSQNQH

SEQ ID NO: 1915 - protein, 13 aa, synthetic construct
GGGSPHSKAQDKQ

SEQ ID NO: 1916 - protein, 13 aa, synthetic construct
GSGSPHSKAQNHL

SEQ ID NO: 1917 - protein, 13 aa, synthetic construct
GSGSPHSKAQIGM

SEQ ID NO: 1918 - protein, 13 aa, synthetic construct
GSGSPHSKALNKQ

SEQ ID NO: 1919 - protein, 13 aa, synthetic construct
GGGSPHSKAQNPQ

SEQ ID NO: 1920 - protein, 13 aa, synthetic construct
GTGSPHSKAPNQL

SEQ ID NO: 1921 - protein, 13 aa, synthetic construct
GSGSPHSKAQLQQ

SEQ ID NO: 1922 - protein, 13 aa, synthetic construct
GGGSPHSKAQYQQ

SEQ ID NO: 1923 - protein, 13 aa, synthetic construct
GGGSPHSKAQHQQ

SEQ ID NO: 1924 - protein, 13 aa, synthetic construct
GSGSPHSKAQRMS

SEQ ID NO: 1925 - protein, 13 aa, synthetic construct
GSGSPHSKAQGIL

SEQ ID NO: 1926 - protein, 13 aa, synthetic construct
GSGSPHSKAQDRQ

SEQ ID NO: 1927 - protein, 13 aa, synthetic construct
GSGSPHSKARDWQ

SEQ ID NO: 1928 - protein, 13 aa, synthetic construct
GSGSPHSKAQNTH

SEQ ID NO: 1929 - protein, 13 aa, synthetic construct
GSGSPHSKAQERS

SEQ ID NO: 1930 - protein, 13 aa, synthetic construct
GSGSPHSKAQNYQ

SEQ ID NO: 1931 - protein, 13 aa, synthetic construct
GSGSPHSKAQRTC

SEQ ID NO: 1932 - protein, 13 aa, synthetic construct
GSGSPHSKAQIGH

SEQ ID NO: 1933 - protein, 13 aa, synthetic construct
GSGSPHSKAQGAI

SEQ ID NO: 1934 - protein, 13 aa, synthetic construct
GSGSPHSKAQVPP

SEQ ID NO: 1935 - protein, 13 aa, synthetic construct
GSGSPHSKAQVQQ

SEQ ID NO: 1936 - protein, 13 aa, synthetic construct
GSGSPHSKALMRQ

SEQ ID NO: 1937 - protein, 13 aa, synthetic construct
GSGSPHSKAQYSV

SEQ ID NO: 1938 - protein, 13 aa, synthetic construct
GSGSPHSKVPNLQ

SEQ ID NO: 1939 - protein, 13 aa, synthetic construct
GSGSPHSKAQAIT

SEQ ID NO: 1940 - protein, 13 aa, synthetic construct
GSGSPHSKAQKTL

SEQ ID NO: 1941 - protein, 13 aa, synthetic construct
GSGSPHSKAQNQW

SEQ ID NO: 1942 - protein, 13 aa, synthetic construct
GSGSPHSKAQLHH

SEQ ID NO: 1943 - protein, 13 aa, synthetic construct
GSGSPHSKAQNII

SEQ ID NO: 1944 - protein, 13 aa, synthetic construct
MEGSPHSKAQNQQ

SEQ ID NO: 1945 - protein, 13 aa, synthetic construct
GSGSPHSKAQGHH

SEQ ID NO: 1946 - protein, 13 aa, synthetic construct
GSGSPHSKAQSKV

SEQ ID NO: 1947 - protein, 13 aa, synthetic construct
GSGSPHSKAQLPS

SEQ ID NO: 1948 - protein, 13 aa, synthetic construct
GSGSPHSKAIGKQ

SEQ ID NO: 1949 - protein, 13 aa, synthetic construct
GGGSPHSKSQNQQ

SEQ ID NO: 1950 - protein, 13 aa, synthetic construct
GSGSPHSKAQAIH

SEQ ID NO: 1951 - protein, 13 aa, synthetic construct
GSGSPHSKAQHGL

SEQ ID NO: 1952 - protein, 13 aa, synthetic construct
GSGSPHSKAQFMC

SEQ ID NO: 1953 - protein, 13 aa, synthetic construct
VSGSPHSKAQGQQ

SEQ ID NO: 1954 - protein, 13 aa, synthetic construct
GGGSPHSKAQNQM

SEQ ID NO: 1955 - protein, 13 aa, synthetic construct
GSGSPHSKAQHLQ

SEQ ID NO: 1956 - protein, 13 aa, synthetic construct
ENGSPHSKAQNQQ

SEQ ID NO: 1957 - protein, 13 aa, synthetic construct
GSGSPHSKTQNHQ

SEQ ID NO: 1958 - protein, 13 aa, synthetic construct
GSGSPHSKAQPAR

SEQ ID NO: 1959 - protein, 13 aa, synthetic construct
GSGSPHSKAQSLQ

SEQ ID NO: 1960 - protein, 13 aa, synthetic construct
GSGSPHSKSQSQL

SEQ ID NO: 1961 - protein, 13 aa, synthetic construct
GSASPHSKAHSQQ

SEQ ID NO: 1962 - protein, 13 aa, synthetic construct
GSGSPHSKAQMPS

SEQ ID NO: 1963 - protein, 13 aa, synthetic construct
GSGSPHSKAQGSL

SEQ ID NO: 1964 - protein, 13 aa, synthetic construct
GSGSPHSKSQNQQ

SEQ ID NO: 1965 - protein, 13 aa, synthetic construct
GNGSPHSKSQNQQ

SEQ ID NO: 1966 - protein, 13 aa, synthetic construct
GSGSPHSKAQVPA

SEQ ID NO: 1967 - protein, 13 aa, synthetic construct
GNGSPHSKAQNLQ

SEQ ID NO: 1968 - protein, 13 aa, synthetic construct
GSGSPHSKAQDKQ

SEQ ID NO: 1969 - protein, 13 aa, synthetic construct
GSGSPHSKAHYQQ

SEQ ID NO: 1970 - protein, 13 aa, synthetic construct
GSGSPHSKAQVPS

SEQ ID NO: 1971 - protein, 13 aa, synthetic construct
GGGSPHSKAQNHQ

SEQ ID NO: 1972 - protein, 13 aa, synthetic construct
GSGSPHSKARGEQ

SEQ ID NO: 1973 - protein, 13 aa, synthetic construct
GGGSPHSKAQYQH

SEQ ID NO: 1974 - protein, 13 aa, synthetic construct
GSGSPHSKAPGQQ

SEQ ID NO: 1975 - protein, 13 aa, synthetic construct
KNGSPHSKAQNQQ

SEQ ID NO: 1976 - protein, 13 aa, synthetic construct
GSGSPHSKRLEQQ

SEQ ID NO: 1977 - protein, 13 aa, synthetic construct
GSGSPHSKAQNQS

SEQ ID NO: 1978 - protein, 13 aa, synthetic construct
GSGSPHSKAQKVI

SEQ ID NO: 1979 - protein, 13 aa, synthetic construct
GSGSPHSKAQNND

SEQ ID NO: 1980 - protein, 13 aa, synthetic construct
GSGSPHSKAQSVH

SEQ ID NO: 1981 - protein, 13 aa, synthetic construct
GSGSPHSKAQPLG

SEQ ID NO: 1982 - protein, 13 aa, synthetic construct
KEGSPHSKAQNQQ

SEQ ID NO: 1983 - protein, 13 aa, synthetic construct
GSGSPHSKAHNQE

SEQ ID NO: 1984 - protein, 13 aa, synthetic construct
GSGSPHSKAQIQQ

SEQ ID NO: 1985 - protein, 13 aa, synthetic construct
GSGSPHSKAQVRN

SEQ ID NO: 1986 - protein, 13 aa, synthetic construct
GSGSPHSKAPSNQ

SEQ ID NO: 1987 - protein, 13 aa, synthetic construct
GSGSPHSKAQVGH

SEQ ID NO: 1988 - protein, 13 aa, synthetic construct
GSGSPHSKAQRDI

SEQ ID NO: 1989 - protein, 13 aa, synthetic construct
GSGSPHSKAQMPN

SEQ ID NO: 1990 - protein, 13 aa, synthetic construct
AIGSPHSKAQNQQ

SEQ ID NO: 1991 - protein, 13 aa, synthetic construct
GSGSPHSKARGLQ

SEQ ID NO: 1992 - protein, 13 aa, synthetic construct
GSGSPHSKLQKQQ

SEQ ID NO: 1993 - protein, 13 aa, synthetic construct
GSGSPHSKAPSLQ

SEQ ID NO: 1994 - protein, 13 aa, synthetic construct
GSGSPHSKAQRDQ

SEQ ID NO: 1995 - protein, 13 aa, synthetic construct
GSGSPHSKNRDQQ

SEQ ID NO: 1996 - protein, 13 aa, synthetic construct
GSGSPHSKAQAKG

SEQ ID NO: 1997 - protein, 13 aa, synthetic construct
GSGSPHSKAQSAH

SEQ ID NO: 1998 - protein, 13 aa, synthetic construct
GNGSPHSKSQNQH

SEQ ID NO: 1999 - protein, 13 aa, synthetic construct
GSGSPHSKSQNHQ

SEQ ID NO: 2000 - protein, 13 aa, synthetic construct
RSGSPHSKAQDQQ

SEQ ID NO: 2001 - protein, 13 aa, synthetic construct
GSGSPHSKAQSTM

SEQ ID NO: 2002 - protein, 13 aa, synthetic construct
GSGSPHSKAQREM

SEQ ID NO: 2003 - protein, 13 aa, synthetic construct
GGGSPHSKSQNRQ

SEQ ID NO: 2004 - protein, 13 aa, synthetic construct
GSGSPHSKAQYRA

SEQ ID NO: 2005 - protein, 13 aa, synthetic construct
GGGSPHSKAQRQQ

SEQ ID NO: 2006 - protein, 13 aa, synthetic construct
GSGSPHSKNQWQQ

SEQ ID NO: 2007 - protein, 13 aa, synthetic construct
GSGSPHSKAQRMN

SEQ ID NO: 2008 - protein, 13 aa, synthetic construct
GSGSPHAKAQNHQ

SEQ ID NO: 2009 - protein, 13 aa, synthetic construct
GSGSPHSKAGDSQ

SEQ ID NO: 2010 - protein, 13 aa, synthetic construct
GSGSPHSKLKSQQ

SEQ ID NO: 2011 - protein, 13 aa, synthetic construct
GSGSPHSKAQKIS

SEQ ID NO: 2012 - protein, 13 aa, synthetic construct
GSGSPHSKAPSMQ

SEQ ID NO: 2013 - protein, 13 aa, synthetic construct
GSGSPHSKASPRQ

SEQ ID NO: 2014 - protein, 13 aa, synthetic construct
GSGSPHSKRMEQQ

SEQ ID NO: 2015 - protein, 13 aa, synthetic construct
GSGSPHSKAQYQN

SEQ ID NO: 2016 - protein, 13 aa, synthetic construct
GSGSPHARMQNQQ

SEQ ID NO: 2017 - protein, 13 aa, synthetic construct
GSGSPHVKSQNQQ

SEQ ID NO: 2018 - protein, 13 aa, synthetic construct
GQDSPHKSGQNQQ

SEQ ID NO: 2019 - protein, 13 aa, synthetic construct
GSGSPHASRQNQQ

SEQ ID NO: 2020 - protein, 13 aa, synthetic construct
GSGSPHASRQNKQ

SEQ ID NO: 2021 - protein, 13 aa, synthetic construct
GSGSPHVKIQNQQ

SEQ ID NO: 2022 - protein, 13 aa, synthetic construct
GSGSPHSKAKNQQ

SEQ ID NO: 2023 - protein, 13 aa, synthetic construct
GSGSPHKKNQNQQ

SEQ ID NO: 2024 - protein, 13 aa, synthetic construct
GSGSPHVRMQNQQ

SEQ ID NO: 2025 - protein, 13 aa, synthetic construct
GSGSPHASRQKQQ

SEQ ID NO: 2026 - protein, 13 aa, synthetic construct
GHSSPHRSGQNQQ

SEQ ID NO: 2027 - protein, 13 aa, synthetic construct
GSGSPHTRGQNQQ

SEQ ID NO: 2028 - protein, 13 aa, synthetic construct
CSGSPHSKAQNQQ

SEQ ID NO: 2029 - protein, 13 aa, synthetic construct
GSGSPHRKAQNQQ

SEQ ID NO: 2030 - protein, 13 aa, synthetic construct
GSGSPHSKAQNKQ

SEQ ID NO: 2031 - protein, 13 aa, synthetic construct
GSGSPHSKAQTQQ

SEQ ID NO: 2032 - protein, 13 aa, synthetic construct
CSGSPHKTSQNQQ

SEQ ID NO: 2033 - protein, 13 aa, synthetic construct
CSHSPHKSGQNQQ

SEQ ID NO: 2034 - protein, 13 aa, synthetic construct
GQSSPHRSGQNQQ

SEQ ID NO: 2035 - protein, 13 aa, synthetic construct
GRGSPHASRQNQQ

SEQ ID NO: 2036 - protein, 13 aa, synthetic construct
GSGSPHASRKNQQ

SEQ ID NO: 2037 - protein, 13 aa, synthetic construct
GSGSPHASRQNQH

SEQ ID NO: 2038 - protein, 13 aa, synthetic construct
GSGSPHKFGKNQQ

SEQ ID NO: 2039 - protein, 13 aa, synthetic construct
GSGSPHKFGQKQQ

SEQ ID NO: 2040 - protein, 13 aa, synthetic construct
GSGSPHKFGQNQQ

SEQ ID NO: 2041 - protein, 13 aa, synthetic construct
GSGSPHKIGQNQQ

SEQ ID NO: 2042 - protein, 13 aa, synthetic construct
GSGSPHKLGQNQQ

SEQ ID NO: 2043 - protein, 13 aa, synthetic construct
GSGSPHKTSKNQQ

SEQ ID NO: 2044 - protein, 13 aa, synthetic construct
GSGSPHKTSQKQQ

SEQ ID NO: 2045 - protein, 13 aa, synthetic construct
GSGSPHKTSQNQQ

SEQ ID NO: 2046 - protein, 13 aa, synthetic construct
GSGSPHKTTQNQQ

SEQ ID NO: 2047 - protein, 13 aa, synthetic construct
GSGSPHKTYQNQQ

SEQ ID NO: 2048 - protein, 13 aa, synthetic construct
GSGSPHKYGQNQQ

SEQ ID NO: 2049 - protein, 13 aa, synthetic construct
GSGSPHSKAQHQQ

SEQ ID NO: 2050 - protein, 13 aa, synthetic construct
GSGSPHSKDQNQQ

SEQ ID NO: 2051 - protein, 13 aa, synthetic construct
GSGSPHSKPQNQQ

SEQ ID NO: 2052 - protein, 13 aa, synthetic construct
GSGSPHVRGQKQQ

SEQ ID NO: 2053 - protein, 13 aa, synthetic construct
GSGSPHVRGQNKQ

SEQ ID NO: 2054 - protein, 13 aa, synthetic construct
GSHSPHKRGQNQQ

SEQ ID NO: 2055 - protein, 13 aa, synthetic construct
GSHSPHKSGQKQQ

SEQ ID NO: 2056 - protein, 13 aa, synthetic construct
GSHSPHKSGQNQQ

SEQ ID NO: 2057 - protein, 13 aa, synthetic construct
VSGSPHASRQNQQ

SEQ ID NO: 2058 - protein, 13 aa, synthetic construct
VSGSPHGARQNQQ

SEQ ID NO: 2059 - protein, 13 aa, synthetic construct
VSGSPHKFGQNQQ

SEQ ID NO: 2060 - protein, 13 aa, synthetic construct
GSGSPHSKAQYYV

SEQ ID NO: 2061 - protein, 13 aa, synthetic construct
GSGSPHSKLRRQQ

SEQ ID NO: 2062 - protein, 13 aa, synthetic construct
GSGSPHSKAGCGQ

SEQ ID NO: 2063 - protein, 13 aa, synthetic construct
GSGSPHSRAQNQQ

SEQ ID NO: 2064 - protein, 13 aa, synthetic construct
GSGSPHSKRLRQQ

SEQ ID NO: 2065 - protein, 13 aa, synthetic construct
GSGSPHSLRRNQQ

SEQ ID NO: 2066 - protein, 13 aa, synthetic construct
GSGSPHSRGRNQQ

SEQ ID NO: 2067 - protein, 13 aa, synthetic construct
GSGSPHSSRRNQQ

SEQ ID NO: 2068 - protein, 13 aa, synthetic construct
GSGSPHSKAFRLQ

SEQ ID NO: 2069 - protein, 13 aa, synthetic construct
GSCSPHRKAQNQQ

SEQ ID NO: 2070 - protein, 13 aa, synthetic construct
GSGSPHFLRQNQQ

SEQ ID NO: 2071 - protein, 13 aa, synthetic construct
GSGSPHSLRFNQQ

SEQ ID NO: 2072 - protein, 13 aa, synthetic construct
GSGSPHSKWLLQQ

SEQ ID NO: 2073 - protein, 13 aa, synthetic construct
GSGSPHSKRRLQQ

SEQ ID NO: 2074 - protein, 13 aa, synthetic construct
GSGSPHSKAQRKL

SEQ ID NO: 2075 - protein, 13 aa, synthetic construct
GSGSPHSKALRRQ

SEQ ID NO: 2076 - protein, 13 aa, synthetic construct
GSGSPHSKAQRLR

SEQ ID NO: 2077 - protein, 13 aa, synthetic construct
GSGSPHSKAQRRL

SEQ ID NO: 2078 - protein, 13 aa, synthetic construct
GSGSPHSKARRQQ

SEQ ID NO: 2079 - protein, 13 aa, synthetic construct
GSGSPHSKARRLQ

SEQ ID NO: 2080 - protein, 13 aa, synthetic construct
GSGSPHSKSRRQQ

SEQ ID NO: 2081 - protein, 13 aa, synthetic construct
GLLSPHWKAQNQQ

SEQ ID NO: 2082 - protein, 13 aa, synthetic construct
GSGSPHSKARLRQ

SEQ ID NO: 2083 - protein, 13 aa, synthetic construct
GSGSPHSKASKRQ

SEQ ID NO: 2084 - protein, 13 aa, synthetic construct
GSGSPHVRRQNQQ

SEQ ID NO: 2085 - protein, 13 aa, synthetic construct
GSGSPHSKAQLYR

SEQ ID NO: 2086 - protein, 13 aa, synthetic construct
GSGSPHSKAQLTV

SEQ ID NO: 2087 - protein, 13 aa, synthetic construct
GHDSPHKRGQHRQ

SEQ ID NO: 2088 - protein, 13 aa, synthetic construct
GHDSPHKSGQKQQ

SEQ ID NO: 2089 - protein, 13 aa, synthetic construct
GHDSPHKSGLTQQ

SEQ ID NO: 2090 - protein, 13 aa, synthetic construct
GDDSPHKSGRNQQ

SEQ ID NO: 2091 - protein, 13 aa, synthetic construct
GHDSPHKSGLNQQ

SEQ ID NO: 2092 - protein, 13 aa, synthetic construct
GHESPHKSAQNHQ

SEQ ID NO: 2093 - protein, 13 aa, synthetic construct
GHDSPHKSAQNQW

SEQ ID NO: 2094 - protein, 13 aa, synthetic construct
GHDSPHKSGQNTH

SEQ ID NO: 2095 - protein, 13 aa, synthetic construct
GHDSPHKSGRRRQ

SEQ ID NO: 2096 - protein, 13 aa, synthetic construct
GHDSPHKSAQNQQ

SEQ ID NO: 2097 - protein, 13 aa, synthetic construct
GHDSPHKSGQYQQ

SEQ ID NO: 2098 - protein, 13 aa, synthetic construct
GNYSPHKIGQNQQ

SEQ ID NO: 2099 - protein, 13 aa, synthetic construct
GHDSPHKSRQNDQ

SEQ ID NO: 2100 - protein, 13 aa, synthetic construct
GHDSPHKSGQIRQ

SEQ ID NO: 2101 - protein, 13 aa, synthetic construct
GHDSPHKIGQNQH

SEQ ID NO: 2102 - protein, 13 aa, synthetic construct
GYDSPHKSGQKQQ

SEQ ID NO: 2103 - protein, 13 aa, synthetic construct
GHDSPHKSGQSVQ

SEQ ID NO: 2104 - protein, 13 aa, synthetic construct
GHESPHKSGRSQQ

SEQ ID NO: 2105 - protein, 13 aa, synthetic construct
GHDSPHKSGQNKL

SEQ ID NO: 2106 - protein, 13 aa, synthetic construct
GHDSPHKTGQNQQ

SEQ ID NO: 2107 - protein, 13 aa, synthetic construct
GRGSPHKRGQNQQ

SEQ ID NO: 2108 - protein, 13 aa, synthetic construct
GSGSPHTKAQNPP

SEQ ID NO: 2109 - protein, 13 aa, synthetic construct
GQDSPHKSGQHQQ

SEQ ID NO: 2110 - protein, 13 aa, synthetic construct
GHDSPHKSGQIQH

SEQ ID NO: 2111 - protein, 13 aa, synthetic construct
GHDSPHKSGPRQQ

SEQ ID NO: 2112 - protein, 13 aa, synthetic construct
GHDSPHKSGHTQQ

SEQ ID NO: 2113 - protein, 13 aa, synthetic construct
GHDSPHKSGQRQH

SEQ ID NO: 2114 - protein, 13 aa, synthetic construct
GSGSPHTKAQNQQ

SEQ ID NO: 2115 - protein, 13 aa, synthetic construct
GHDSPHKSAQSQQ

SEQ ID NO: 2116 - protein, 13 aa, synthetic construct
GHESPHKSGQNQQ

SEQ ID NO: 2117 - protein, 13 aa, synthetic construct
GHDSPHKSLQNQQ

SEQ ID NO: 2118 - protein, 13 aa, synthetic construct
GHGSPHSKAQNPQ

SEQ ID NO: 2119 - protein, 13 aa, synthetic construct
GHDSPHKSGRNQE

SEQ ID NO: 2120 - protein, 13 aa, synthetic construct
GHDSPHKSGQTQL

SEQ ID NO: 2121 - protein, 13 aa, synthetic construct
GHDSPHKSEKNQQ

SEQ ID NO: 2122 - protein, 13 aa, synthetic construct
GRDSPHKSGQDQQ

SEQ ID NO: 2123 - protein, 13 aa, synthetic construct
GHDSPHKTGHNQQ

SEQ ID NO: 2124 - protein, 13 aa, synthetic construct
GYDSPHKSGQTQQ

SEQ ID NO: 2125 - protein, 13 aa, synthetic construct
GHESPHKSGQTQQ

SEQ ID NO: 2126 - protein, 13 aa, synthetic construct
GHDSPHKSGQSKQ

SEQ ID NO: 2127 - protein, 13 aa, synthetic construct
GHDSPHKTGQNQP

SEQ ID NO: 2128 - protein, 13 aa, synthetic construct
GHDSPHKSGQSPQ

SEQ ID NO: 2129 - protein, 13 aa, synthetic construct
GNDSPHKSVQNQQ

SEQ ID NO: 2130 - protein, 13 aa, synthetic construct
GHDSPHKSAQNYQ

SEQ ID NO: 2131 - protein, 13 aa, synthetic construct
GSASPHSKALNQQ

SEQ ID NO: 2132 - protein, 13 aa, synthetic construct
GHESPHKSAQNRQ

SEQ ID NO: 2133 - protein, 13 aa, synthetic construct
GQDSPHKIGQNQQ

SEQ ID NO: 2134 - protein, 13 aa, synthetic construct
GHDSPHKSGQNHL

SEQ ID NO: 2135 - protein, 13 aa, synthetic construct
GHDSPHKSGQYQH

SEQ ID NO: 2136 - protein, 13 aa, synthetic construct
GNDSPHKSVQNHQ

SEQ ID NO: 2137 - protein, 13 aa, synthetic construct
GHDSPHKSGQNQW

SEQ ID NO: 2138 - protein, 13 aa, synthetic construct
GHDSPHKSVQNQH

SEQ ID NO: 2139 - protein, 13 aa, synthetic construct
GHDSPHKSGQNQH

SEQ ID NO: 2140 - protein, 13 aa, synthetic construct
GHDSPHKSGQTRQ

SEQ ID NO: 2141 - protein, 13 aa, synthetic construct
GHDSPHKSGQNLH

SEQ ID NO: 2142 - protein, 13 aa, synthetic construct
GHDSPHKSAQNQE

SEQ ID NO: 2143 - protein, 13 aa, synthetic construct
GHDSPHKSGQHLQ

SEQ ID NO: 2144 - protein, 13 aa, synthetic construct
GHDSPHKSRLNQP

SEQ ID NO: 2145 - protein, 13 aa, synthetic construct
GQDSPHKSGQNQD

SEQ ID NO: 2146 - protein, 13 aa, synthetic construct
GHDSPHKSGRNQQ

SEQ ID NO: 2147 - protein, 13 aa, synthetic construct
GHDSPHKSGQNLL

SEQ ID NO: 2148 - protein, 13 aa, synthetic construct
GHDSPHKSGQLVI

SEQ ID NO: 2149 - protein, 13 aa, synthetic construct
GHDSPHKSRQSQQ

SEQ ID NO: 2150 - protein, 13 aa, synthetic construct
GHDSPHKSGRTQE

SEQ ID NO: 2151 - protein, 13 aa, synthetic construct
GHDSPHKSVQTHQ

SEQ ID NO: 2152 - protein, 13 aa, synthetic construct
GHDSPHKSGQNQP

SEQ ID NO: 2153 - protein, 13 aa, synthetic construct
GHDSPHKSGQTQQ

SEQ ID NO: 2154 - protein, 13 aa, synthetic construct
GPDSPHKIGQNQQ

SEQ ID NO: 2155 - protein, 13 aa, synthetic construct
GHDSPHKSVQNQQ

SEQ ID NO: 2156 - protein, 13 aa, synthetic construct
GHDSPHKSRQDQH

SEQ ID NO: 2157 - protein, 13 aa, synthetic construct
GPDSPHKSGQKQQ

SEQ ID NO: 2158 - protein, 13 aa, synthetic construct
GHDSPHKSRQSQH

SEQ ID NO: 2159 - protein, 13 aa, synthetic construct
GHDSPHKSVQNQL

SEQ ID NO: 2160 - protein, 13 aa, synthetic construct
GYDSPHKSGQYQH

SEQ ID NO: 2161 - protein, 13 aa, synthetic construct
GHDSPHKSRQNQQ

SEQ ID NO: 2162 - protein, 13 aa, synthetic construct
GHDSPHKSWVRQQ

SEQ ID NO: 2163 - protein, 13 aa, synthetic construct
GHESPHKSGQNQH

SEQ ID NO: 2164 - protein, 13 aa, synthetic construct
GHDSPHKIGHNQQ

SEQ ID NO: 2165 - protein, 13 aa, synthetic construct
GHDSPHKSNAWQQ

SEQ ID NO: 2166 - protein, 13 aa, synthetic construct
GHDSPHKSGQSVP

SEQ ID NO: 2167 - protein, 13 aa, synthetic construct
GHESPHKSGQNIQ

SEQ ID NO: 2168 - protein, 13 aa, synthetic construct
GHDSPHKSVQNHL

SEQ ID NO: 2169 - protein, 13 aa, synthetic construct
GHDSPHKIGLDQQ

SEQ ID NO: 2170 - protein, 13 aa, synthetic construct
ASGSPHSKAQHQQ

SEQ ID NO: 2171 - protein, 13 aa, synthetic construct
GHDSPHKRGPDQQ

SEQ ID NO: 2172 - protein, 13 aa, synthetic construct
GMGSPHSKTQNQQ

SEQ ID NO: 2173 - protein, 13 aa, synthetic construct
GHDSPHKSGESQQ

SEQ ID NO: 2174 - protein, 13 aa, synthetic construct
GHDSPHKHGQNHQ

SEQ ID NO: 2175 - protein, 13 aa, synthetic construct
GTGSPHSKAQNQL

SEQ ID NO: 2176 - protein, 13 aa, synthetic construct
GHDSPHKSVQNKQ

SEQ ID NO: 2177 - protein, 13 aa, synthetic construct
GQVSPHKSGQNQQ

SEQ ID NO: 2178 - protein, 13 aa, synthetic construct
GHDSPHKSGQRQL

SEQ ID NO: 2179 - protein, 13 aa, synthetic construct
GHDSPHKIGQNQL

SEQ ID NO: 2180 - protein, 13 aa, synthetic construct
GHDSPHKSGQIIV

SEQ ID NO: 2181 - protein, 13 aa, synthetic construct
GYDSPHKSGQKQS

SEQ ID NO: 2182 - protein, 13 aa, synthetic construct
GNGSPHSKAQNQE

SEQ ID NO: 2183 - protein, 13 aa, synthetic construct
GDDSPHKSVQNQQ

SEQ ID NO: 2184 - protein, 13 aa, synthetic construct
GHDSPHKSVQSHQ

SEQ ID NO: 2185 - protein, 13 aa, synthetic construct
GHDSPHKSGQFVV

SEQ ID NO: 2186 - protein, 13 aa, synthetic construct
GHDSPHKSRQNLQ

SEQ ID NO: 2187 - protein, 13 aa, synthetic construct
GHNSPHKSGQNQE

SEQ ID NO: 2188 - protein, 13 aa, synthetic construct
GHDSPHKSGQSQP

SEQ ID NO: 2189 - protein, 13 aa, synthetic construct
GHESPHKSGQNEQ

SEQ ID NO: 2190 - protein, 13 aa, synthetic construct
GHDSPHKSGQNQL

SEQ ID NO: 2191 - protein, 13 aa, synthetic construct
GHDSPHKSAQNLL

SEQ ID NO: 2192 - protein, 13 aa, synthetic construct
ASGSPHSKAINQQ

SEQ ID NO: 2193 - protein, 13 aa, synthetic construct
GNGSPHKRGQNQQ

SEQ ID NO: 2194 - protein, 13 aa, synthetic construct
GHDSPHKSGQSLQ

SEQ ID NO: 2195 - protein, 13 aa, synthetic construct
GHDSPHKSAQNHQ

SEQ ID NO: 2196 - protein, 13 aa, synthetic construct
GHDSPHKSGRNRQ

SEQ ID NO: 2197 - protein, 13 aa, synthetic construct
GHDSPHKYGQNEQ

SEQ ID NO: 2198 - protein, 13 aa, synthetic construct
GNGSPHSKAPNLQ

SEQ ID NO: 2199 - protein, 13 aa, synthetic construct
GHDSPHKSQQNQQ

SEQ ID NO: 2200 - protein, 13 aa, synthetic construct
GHDSPHKSVQSKQ

SEQ ID NO: 2201 - protein, 13 aa, synthetic construct
GNDSPHKIGHNQQ

SEQ ID NO: 2202 - protein, 13 aa, synthetic construct
GGGSPHSKAQDQQ

SEQ ID NO: 2203 - protein, 13 aa, synthetic construct
GQDSPHKSGQNPL

SEQ ID NO: 2204 - protein, 13 aa, synthetic construct
ASGSPHSKAQNHQ

SEQ ID NO: 2205 - protein, 13 aa, synthetic construct
GHDSPHKSGRDQK

SEQ ID NO: 2206 - protein, 13 aa, synthetic construct
GHDSPHKSVHNQQ

SEQ ID NO: 2207 - protein, 13 aa, synthetic construct
GHDSPHKSGQWKR

SEQ ID NO: 2208 - protein, 13 aa, synthetic construct
GSGSPHSKAENRQ

SEQ ID NO: 2209 - protein, 13 aa, synthetic construct
GHDSPHKSGQSQQ

SEQ ID NO: 2210 - protein, 13 aa, synthetic construct
GHDSPHKSRQAQQ

SEQ ID NO: 2211 - protein, 13 aa, synthetic construct
GHDSPHKSVQNHQ

SEQ ID NO: 2212 - protein, 13 aa, synthetic construct
GHDSPHKSKQNQQ

SEQ ID NO: 2213 - protein, 13 aa, synthetic construct
GHDSPHKSAQNQL

SEQ ID NO: 2214 - protein, 13 aa, synthetic construct
GHDSPHKSGQTQP

SEQ ID NO: 2215 - protein, 13 aa, synthetic construct
GHDSPHKLWINQQ

SEQ ID NO: 2216 - protein, 13 aa, synthetic construct
GPDSPHKSGQNQQ

SEQ ID NO: 2217 - protein, 13 aa, synthetic construct
GHDSPHKSVQKQL

SEQ ID NO: 2218 - protein, 13 aa, synthetic construct
GHPSPHWKGQNQQ

SEQ ID NO: 2219 - protein, 13 aa, synthetic construct
GHDSPHKSGRNQL

SEQ ID NO: 2220 - protein, 13 aa, synthetic construct
GSGSPHSKVQDQQ

SEQ ID NO: 2221 - protein, 13 aa, synthetic construct
GHDSPHKMGRNQQ

SEQ ID NO: 2222 - protein, 13 aa, synthetic construct
GHDSPHKSGISIQ

SEQ ID NO: 2223 - protein, 13 aa, synthetic construct
GHDSPHKSVQNLQ

SEQ ID NO: 2224 - protein, 13 aa, synthetic construct
GHDSPHKMAHNQQ

SEQ ID NO: 2225 - protein, 13 aa, synthetic construct
GHDSPHKHGQNQQ

SEQ ID NO: 2226 - protein, 13 aa, synthetic construct
GHDSPHKSVQSQQ

SEQ ID NO: 2227 - protein, 13 aa, synthetic construct
GHDSPHKSGQTVC

SEQ ID NO: 2228 - protein, 13 aa, synthetic construct
GQDSPHKSGQYQQ

SEQ ID NO: 2229 - protein, 13 aa, synthetic construct
GHDSPHKSGQQIM

SEQ ID NO: 2230 - protein, 13 aa, synthetic construct
GHDSPHKSRQNEQ

SEQ ID NO: 2231 - protein, 13 aa, synthetic construct
GHDSPHKSGLNHQ

SEQ ID NO: 2232 - protein, 13 aa, synthetic construct
GYDSPHKSGQNQQ

SEQ ID NO: 2233 - protein, 13 aa, synthetic construct
GHDSPHKSGQNLQ

SEQ ID NO: 2234 - protein, 13 aa, synthetic construct
GHDSPHKSRQDQQ

SEQ ID NO: 2235 - protein, 13 aa, synthetic construct
GDDSPHKSGQKQL

SEQ ID NO: 2236 - protein, 13 aa, synthetic construct
GSGSPHSKAQNQA

SEQ ID NO: 2237 - protein, 13 aa, synthetic construct
GDDSPHKSGHNQQ

SEQ ID NO: 2238 - protein, 13 aa, synthetic construct
GHDSPHKSGQMIH

SEQ ID NO: 2239 - protein, 13 aa, synthetic construct
GHDSPHKSGRNHQ

SEQ ID NO: 2240 - protein, 13 aa, synthetic construct
GHDSPHKSVQNRQ

SEQ ID NO: 2241 - protein, 13 aa, synthetic construct
GHDSPHKSGQKMN

SEQ ID NO: 2242 - protein, 16 aa, synthetic construct
TINGSGSPHSKAQNQQ

SEQ ID NO: 2243 - protein, 16 aa, synthetic construct
TINGHDSPHKSGQNQQ

SEQ ID NO: 2244 - protein, 16 aa, synthetic construct
TIIGSGSPHSKAQNRH

SEQ ID NO: 2245 - protein, 16 aa, synthetic construct
TFPGSGSPHSKVQNQQ

SEQ ID NO: 2246 - protein, 16 aa, synthetic construct
TEKMSGSPHSKAQNQQ

SEQ ID NO: 2247 - protein, 16 aa, synthetic construct
EINGRGSPHSKAQNQQ

SEQ ID NO: 2248 - protein, 16 aa, synthetic construct
TVNRNGSPHSKAQNQQ

SEQ ID NO: 2249 - protein, 16 aa, synthetic construct
TVNGSGSPHSKARDQQ

SEQ ID NO: 2250 - protein, 16 aa, synthetic construct
TFNGSGSPHSKAPNLQ

SEQ ID NO: 2251 - protein, 16 aa, synthetic construct
TEKTSGSPHSKAQNQQ

SEQ ID NO: 2252 - protein, 16 aa, synthetic construct
TINGSGSPHSKAHVRQ

SEQ ID NO: 2253 - protein, 16 aa, synthetic construct
TVNGSGSPHSKAPNQH

SEQ ID NO: 2254 - protein, 16 aa, synthetic construct
TEKISGSPHSKAQNQQ

SEQ ID NO: 2255 - protein, 16 aa, synthetic construct
TINGPGSPHSKAHNQQ

SEQ ID NO: 2256 - protein, 16 aa, synthetic construct
TVNGSGSPHSKTQSQQ

SEQ ID NO: 2257 - protein, 16 aa, synthetic construct
SINESGSPHSKAQNQQ

SEQ ID NO: 2258 - protein, 16 aa, synthetic construct
TERTSGSPHSKAQNQQ

SEQ ID NO: 2259 - protein, 16 aa, synthetic construct
TINGSGSPHSKAQPAK

SEQ ID NO: 2260 - protein, 16 aa, synthetic construct
TEKSSGSPHSKAQNQQ

SEQ ID NO: 2261 - protein, 16 aa, synthetic construct
TSYGNGSPHSKAQNQQ

SEQ ID NO: 2262 - protein, 16 aa, synthetic construct
TEKGSGSPHSKAQNQQ

SEQ ID NO: 2263 - protein, 16 aa, synthetic construct
TINGSGSPHSKSQTQQ

SEQ ID NO: 2264 - protein, 16 aa, synthetic construct
TERISGSPHSKAQNQQ

SEQ ID NO: 2265 - protein, 16 aa, synthetic construct
TERASGSPHSKAQNQQ

SEQ ID NO: 2266 - protein, 16 aa, synthetic construct
ELHGSGSPHSKAQNQQ

SEQ ID NO: 2267 - protein, 16 aa, synthetic construct
AINGSGSPHSKAQNLA

SEQ ID NO: 2268 - protein, 16 aa, synthetic construct
TVNGSGSPHSKSQNQL

SEQ ID NO: 2269 - protein, 16 aa, synthetic construct
TERNSGSPHSKAQNQQ

SEQ ID NO: 2270 - protein, 16 aa, synthetic construct
SVNGNGSPHSKAQNQQ

SEQ ID NO: 2271 - protein, 16 aa, synthetic construct
TFNGSGSPHSKAQGQQ

SEQ ID NO: 2272 - protein, 16 aa, synthetic construct
TERVSGSPHSKAQNQQ

SEQ ID NO: 2273 - protein, 16 aa, synthetic construct
TINGSGSPHSKALNRQ

SEQ ID NO: 2274 - protein, 16 aa, synthetic construct
TERLSGSPHSKAQNQQ

SEQ ID NO: 2275 - protein, 16 aa, synthetic construct
TDNGSGSPHSKAHNQQ

SEQ ID NO: 2276 - protein, 16 aa, synthetic construct
TFHGSGSPHSKTQNQQ

SEQ ID NO: 2277 - protein, 16 aa, synthetic construct
TINGGGSPHSKAQTQQ

SEQ ID NO: 2278 - protein, 16 aa, synthetic construct
TSNGSGSPHSKAQNPP

SEQ ID NO: 2279 - protein, 16 aa, synthetic construct
TINGSGSPHSKAQNLQ

SEQ ID NO: 2280 - protein, 16 aa, synthetic construct
TVHGNGSPHSKAQNQQ

SEQ ID NO: 2281 - protein, 16 aa, synthetic construct
TINGGGSPHSKAQNQQ

SEQ ID NO: 2282 - protein, 16 aa, synthetic construct
TENMSGSPHSKAQNQQ

SEQ ID NO: 2283 - protein, 16 aa, synthetic construct
TENVSGSPHSKAQNQQ

SEQ ID NO: 2284 - protein, 16 aa, synthetic construct
TSSGSGSPHSKAQYQQ

SEQ ID NO: 2285 - protein, 16 aa, synthetic construct
TIDGGGSPHSKAQNKQ

SEQ ID NO: 2286 - protein, 16 aa, synthetic construct
TEKVSGSPHSKAQNQQ

SEQ ID NO: 2287 - protein, 16 aa, synthetic construct
AINGSGSPHSKAQDQE

SEQ ID NO: 2288 - protein, 16 aa, synthetic construct
TCNKSGSPHSKAQNQQ

SEQ ID NO: 2289 - protein, 16 aa, synthetic construct
TINGGGSPHSKAQNQL

SEQ ID NO: 2290 - protein, 16 aa, synthetic construct
NINGGGSPHSKAQNQQ

SEQ ID NO: 2291 - protein, 16 aa, synthetic construct
TEHLSGSPHSKAQNQQ

SEQ ID NO: 2292 - protein, 16 aa, synthetic construct
AEMGSGSPHSKAQNQQ

SEQ ID NO: 2293 - protein, 16 aa, synthetic construct
ATNGSGSPHSKAQNHQ

SEQ ID NO: 2294 - protein, 16 aa, synthetic construct
AIKGSGSPHSKAQDQQ

SEQ ID NO: 2295 - protein, 16 aa, synthetic construct
TINGGGSPHSKSQNQL

SEQ ID NO: 2296 - protein, 16 aa, synthetic construct
TVNGNGSPHSKAQNKQ

SEQ ID NO: 2297 - protein, 16 aa, synthetic construct
TINGSGSPHSKGHWQQ

SEQ ID NO: 2298 - protein, 16 aa, synthetic construct
TDKTSGSPHSKAQNQQ

SEQ ID NO: 2299 - protein, 16 aa, synthetic construct
TFKGSGSPHSKAPNQQ

SEQ ID NO: 2300 - protein, 16 aa, synthetic construct
TVNGSGSPHSKAQNQL

SEQ ID NO: 2301 - protein, 16 aa, synthetic construct
TINGSGSPHSKRPEQQ

SEQ ID NO: 2302 - protein, 16 aa, synthetic construct
TINGSGSPHSKAQRTM

SEQ ID NO: 2303 - protein, 16 aa, synthetic construct
TEKASGSPHSKAQNQQ

SEQ ID NO: 2304 - protein, 16 aa, synthetic construct
SDQGSGSPHSKAQNQQ

SEQ ID NO: 2305 - protein, 16 aa, synthetic construct
TEITSGSPHSKAQNQQ

SEQ ID NO: 2306 - protein, 16 aa, synthetic construct
TDKSSGSPHSKAQNQQ

SEQ ID NO: 2307 - protein, 16 aa, synthetic construct
TIDGSGSPHSKAQNQQ

SEQ ID NO: 2308 - protein, 16 aa, synthetic construct
TVNGNGSPHSKAQNQH

SEQ ID NO: 2309 - protein, 16 aa, synthetic construct
NTNGSGSPHSKAQNQQ

SEQ ID NO: 2310 - protein, 16 aa, synthetic construct
TETHSGSPHSKAQNQQ

SEQ ID NO: 2311 - protein, 16 aa, synthetic construct
TINGGGSPHSKALNQQ

SEQ ID NO: 2312 - protein, 16 aa, synthetic construct
TINGSGSPHSKALHQH

SEQ ID NO: 2313 - protein, 16 aa, synthetic construct
TINGTGSPHSKAQNHQ

SEQ ID NO: 2314 - protein, 16 aa, synthetic construct
TINGSGSPHSKAQHRI

SEQ ID NO: 2315 - protein, 16 aa, synthetic construct
TINGSGSPHSKAQYIH

SEQ ID NO: 2316 - protein, 16 aa, synthetic construct
TENISGSPHSKAQNQQ

SEQ ID NO: 2317 - protein, 16 aa, synthetic construct
TIIGGGSPHSKAHNQQ

SEQ ID NO: 2318 - protein, 16 aa, synthetic construct
TINGSGSPHSKAQKFE

SEQ ID NO: 2319 - protein, 16 aa, synthetic construct
TSNESGSPHSKAQNHQ

SEQ ID NO: 2320 - protein, 16 aa, synthetic construct
TINGSGSPHSKAQFPS

SEQ ID NO: 2321 - protein, 16 aa, synthetic construct
TERPSGSPHSKAQNQQ

SEQ ID NO: 2322 - protein, 16 aa, synthetic construct
TINGNGSPHSKAQNPL

SEQ ID NO: 2323 - protein, 16 aa, synthetic construct
SIKGNGSPHSKAQNQQ

SEQ ID NO: 2324 - protein, 16 aa, synthetic construct
TERMSGSPHSKAQNQQ

SEQ ID NO: 2325 - protein, 16 aa, synthetic construct
TERSSGSPHSKAQNQQ

SEQ ID NO: 2326 - protein, 16 aa, synthetic construct
TELHSGSPHSKAQNQQ

SEQ ID NO: 2327 - protein, 16 aa, synthetic construct
TELTSGSPHSKAQNQQ

SEQ ID NO: 2328 - protein, 16 aa, synthetic construct
TINGSGSPHSKAHNQQ

SEQ ID NO: 2329 - protein, 16 aa, synthetic construct
TINGGGSPHSKAQSQQ

SEQ ID NO: 2330 - protein, 16 aa, synthetic construct
TINGSGSPHSKAQAIK

SEQ ID NO: 2331 - protein, 16 aa, synthetic construct
TENTSGSPHSKAQNQQ

SEQ ID NO: 2332 - protein, 16 aa, synthetic construct
TIDGSGSPHSKGQNRQ

SEQ ID NO: 2333 - protein, 16 aa, synthetic construct
NINGSGSPHSKAQSQQ

SEQ ID NO: 2334 - protein, 16 aa, synthetic construct
TINGSVSPHGKAQNQL

SEQ ID NO: 2335 - protein, 16 aa, synthetic construct
TSNASGSPHSKAQNQL

SEQ ID NO: 2336 - protein, 16 aa, synthetic construct
TEARSGSPHSKAQNQQ

SEQ ID NO: 2337 - protein, 16 aa, synthetic construct
TEKNSGSPHSKAQNQQ

SEQ ID NO: 2338 - protein, 16 aa, synthetic construct
TANGSGSPHSKAQYQQ

SEQ ID NO: 2339 - protein, 16 aa, synthetic construct
TVNGSGSPHSKAQYQH

SEQ ID NO: 2340 - protein, 16 aa, synthetic construct
TINGSGSPHTKAQNPQ

SEQ ID NO: 2341 - protein, 16 aa, synthetic construct
TINGSGSPHSKGQNPP

SEQ ID NO: 2342 - protein, 16 aa, synthetic construct
TIIGSGSPHSKAQHQL

SEQ ID NO: 2343 - protein, 16 aa, synthetic construct
TINGSGSPHSKAQSPP

SEQ ID NO: 2344 - protein, 16 aa, synthetic construct
TIYGSGSPHSKAQNQQ

SEQ ID NO: 2345 - protein, 16 aa, synthetic construct
TINGSGSPHSKAQAKL

SEQ ID NO: 2346 - protein, 16 aa, synthetic construct
TDKNSGSPHSKAQNQQ

SEQ ID NO: 2347 - protein, 16 aa, synthetic construct
TINGSGSPHSKTKSQQ

SEQ ID NO: 2348 - protein, 16 aa, synthetic construct
TINGSGSPHSKAQDRP

SEQ ID NO: 2349 - protein, 16 aa, synthetic construct
TINGIGSPHSKAQNLG

SEQ ID NO: 2350 - protein, 16 aa, synthetic construct
TINGSGSPHSKAQSQQ

SEQ ID NO: 2351 - protein, 16 aa, synthetic construct
TENLSGSPHSKAQNQQ

SEQ ID NO: 2352 - protein, 16 aa, synthetic construct
TINGSGSPHSKAQAFH

SEQ ID NO: 2353 - protein, 16 aa, synthetic construct
TINGSGSPHSKAQKQQ

SEQ ID NO: 2354 - protein, 16 aa, synthetic construct
TFSGSGSPHSKAQNLQ

SEQ ID NO: 2355 - protein, 16 aa, synthetic construct
AINGSGSPHSKAQNAQ

SEQ ID NO: 2356 - protein, 16 aa, synthetic construct
TESWSGSPHSKAQNQQ

SEQ ID NO: 2357 - protein, 16 aa, synthetic construct
TTNGSGSPHSKAHNQL

SEQ ID NO: 2358 - protein, 16 aa, synthetic construct
TVNGNGSPHSKAQNHQ

SEQ ID NO: 2359 - protein, 16 aa, synthetic construct
TEDKSGSPHSKAQNQQ

SEQ ID NO: 2360 - protein, 16 aa, synthetic construct
TESASGSPHSKAQNQQ

SEQ ID NO: 2361 - protein, 16 aa, synthetic construct
TNNGSGSPHSKAQNQQ

SEQ ID NO: 2362 - protein, 16 aa, synthetic construct
TSNGGGSPHSKAQNLQ

SEQ ID NO: 2363 - RNA, 21 nt, synthetic construct
  source 1..21: mol_type = other RNA
taacagatgagttaaggggtt

SEQ ID NO: 2364 - protein, 16 aa, synthetic construct
EVHGSGSPHSKAQNQQ

SEQ ID NO: 2365 - RNA, 21 nt, synthetic construct
  source 1..21: mol_type = other RNA
ttaacagatgagttaagggtt

SEQ ID NO: 2366 - protein, 16 aa, synthetic construct
TINGGGSPHSKSQNQH

SEQ ID NO: 2367 - protein, 16 aa, synthetic construct
TVNGGGSPHSKAQSQQ

SEQ ID NO: 2368 - protein, 16 aa, synthetic construct
TTNGSGSPHSKAQYQH

SEQ ID NO: 2369 - protein, 16 aa, synthetic construct
TISGSGSPHSKAQYQH

SEQ ID NO: 2370 - protein, 16 aa, synthetic construct
TESTSGSPHSKAQNQQ

SEQ ID NO: 2371 - protein, 16 aa, synthetic construct
TINGSGSPHSKSQNVQ

SEQ ID NO: 2372 - protein, 16 aa, synthetic construct
SINGSGSPHSKAQAQQ

SEQ ID NO: 2373 - protein, 16 aa, synthetic construct
TVNGSGSPHSKAQNLQ

SEQ ID NO: 2374 - protein, 16 aa, synthetic construct
TVRDSGSPHSKAQNQQ

SEQ ID NO: 2375 - protein, 16 aa, synthetic construct
TFNASGSPHSKAPNQQ

SEQ ID NO: 2376 - RNA, 21 nt, synthetic construct
  source 1..21: mol_type = other RNA
cccttaactgatctgttaacc

SEQ ID NO: 2377 - protein, 16 aa, synthetic construct
TINGSGSPHSKAQTPP

SEQ ID NO: 2378 - protein, 16 aa, synthetic construct
TIKGSGSPHSKAQNQQ

SEQ ID NO: 2379 - protein, 16 aa, synthetic construct
NHIGSGSPHSKAQNQQ

SEQ ID NO: 2380 - protein, 16 aa, synthetic construct
TINGSGSPHSKAQYQH

SEQ ID NO: 2381 - RNA, 21 nt, synthetic construct
  source 1..21: mol_type = other RNA
ccccttaactcatttgttccc

SEQ ID NO: 2382 - protein, 16 aa, synthetic construct
TINGSGSPHSKAQGQQ

SEQ ID NO: 2383 - protein, 16 aa, synthetic construct
TFNGSGSPHNKAQNHQ

SEQ ID NO: 2384 - protein, 16 aa, synthetic construct
ESDGSGSPHSKAQNQQ

SEQ ID NO: 2385 - protein, 16 aa, synthetic construct
TINGSGSPHSKAQPPA

SEQ ID NO: 2386 - protein, 16 aa, synthetic construct
TINGSGSPHSKAQERP

SEQ ID NO: 2387 - protein, 16 aa, synthetic construct
TIKGSGSPHSKAQDLQ

SEQ ID NO: 2388 - protein, 16 aa, synthetic construct
TDLKSGSPHSKAQNQQ

SEQ ID NO: 2389 - protein, 16 aa, synthetic construct
TINGGGSPHSKAQNPP

SEQ ID NO: 2390 - protein, 16 aa, synthetic construct
TINGSGSPHSKAQAMH

SEQ ID NO: 2391 - protein, 16 aa, synthetic construct
TVPNSGSPHSKAQNQQ

SEQ ID NO: 2392 - protein, 16 aa, synthetic construct
TVIGSGSPHSKALNQQ

SEQ ID NO: 2393 - protein, 16 aa, synthetic construct
TINGSGSPHSKAQHPS

SEQ ID NO: 2394 - protein, 16 aa, synthetic construct
TINGLGSPHSKSQNQQ

SEQ ID NO: 2395 - protein, 16 aa, synthetic construct
TINGTGSPHSKAQNQQ

SEQ ID NO: 2396 - protein, 16 aa, synthetic construct
TINGSGSPHSKAPGLQ

SEQ ID NO: 2397 - protein, 16 aa, synthetic construct
TINGSGSPHSKAQGIR

SEQ ID NO: 2398 - protein, 16 aa, synthetic construct
TESHSGSPHSKAQNQQ

SEQ ID NO: 2399 - protein, 16 aa, synthetic construct
TINGSGSPHSKAQAPA

SEQ ID NO: 2400 - protein, 16 aa, synthetic construct
TINGSGSPHSKSQSQQ

SEQ ID NO: 2401 - protein, 16 aa, synthetic construct
AEHGSGSPHSKAQNQQ

SEQ ID NO: 2402 - protein, 16 aa, synthetic construct
TEDRSGSPHSKAQNQQ

SEQ ID NO: 2403 - protein, 16 aa, synthetic construct
NCLGSGSPHSKAQNQQ

SEQ ID NO: 2404 - protein, 16 aa, synthetic construct
TDRGSGSPHSKAQNQQ

SEQ ID NO: 2405 - protein, 16 aa, synthetic construct
TINGSGSPHSKAQIPP

SEQ ID NO: 2406 - protein, 16 aa, synthetic construct
TVKGSGSPHSKAQDQQ

SEQ ID NO: 2407 - protein, 16 aa, synthetic construct
NADGSGSPHSKAQNQQ

SEQ ID NO: 2408 - protein, 16 aa, synthetic construct
TDKVSGSPHSKAQNQQ

SEQ ID NO: 2409 - protein, 16 aa, synthetic construct
TITGSGSPHSKAQTQL

SEQ ID NO: 2410 - protein, 16 aa, synthetic construct
TINGSGSPHSKAQAPS

SEQ ID NO: 2411 - protein, 16 aa, synthetic construct
NCVGSGSPHSKAQNQQ

SEQ ID NO: 2412 - protein, 16 aa, synthetic construct
TIRDAGSPHSKAQNQQ

SEQ ID NO: 2413 - protein, 16 aa, synthetic construct
TVKDSGSPHSKAQNQQ

SEQ ID NO: 2414 - protein, 16 aa, synthetic construct
NALGSGSPHSKAQNQQ

SEQ ID NO: 2415 - protein, 16 aa, synthetic construct
VINGSGSPHSKGQNQQ

SEQ ID NO: 2416 - protein, 16 aa, synthetic construct
TVNGGGSPHSKAQNQQ

SEQ ID NO: 2417 - protein, 16 aa, synthetic construct
TIQDGGSPHSKAQNQQ

SEQ ID NO: 2418 - protein, 16 aa, synthetic construct
TISGGGSPHSKAQNQQ

SEQ ID NO: 2419 - protein, 16 aa, synthetic construct
TSNASGSPHSKAHNQQ

SEQ ID NO: 2420 - protein, 16 aa, synthetic construct
TINGSGSPHSKAQNTY

SEQ ID NO: 2421 - protein, 16 aa, synthetic construct
TINGSGSPHSKSQNQH

SEQ ID NO: 2422 - protein, 16 aa, synthetic construct
TINGGGSPHSKAQDKQ

SEQ ID NO: 2423 - protein, 16 aa, synthetic construct
TEFVSGSPHSKAQNQQ

SEQ ID NO: 2424 - protein, 16 aa, synthetic construct
TVNGSGSPHSKAQNHL

SEQ ID NO: 2425 - protein, 16 aa, synthetic construct
TREISGSPHSKAQNQQ

SEQ ID NO: 2426 - protein, 16 aa, synthetic construct
TINGSGSPHSKAQIGM

SEQ ID NO: 2427 - protein, 16 aa, synthetic construct
TIDGSGSPHSKALNKQ

SEQ ID NO: 2428 - protein, 16 aa, synthetic construct
TIIGGGSPHSKAQNPQ

SEQ ID NO: 2429 - protein, 16 aa, synthetic construct
QGEGSGSPHSKAQNQQ

SEQ ID NO: 2430 - protein, 16 aa, synthetic construct
TINGTGSPHSKAPNQL

SEQ ID NO: 2431 - protein, 16 aa, synthetic construct
TVNGSGSPHSKAQLQQ

SEQ ID NO: 2432 - protein, 16 aa, synthetic construct
TFNGGGSPHSKAQYQQ

SEQ ID NO: 2433 - protein, 16 aa, synthetic construct
SINGSGSPHSKTQSQQ

SEQ ID NO: 2434 - protein, 16 aa, synthetic construct
TVNGGGSPHSKAQHQQ

SEQ ID NO: 2435 - protein, 16 aa, synthetic construct
SEKGSGSPHSKAQNQQ

SEQ ID NO: 2436 - protein, 16 aa, synthetic construct
NVNGSGSPHSKAQNQQ

SEQ ID NO: 2437 - protein, 16 aa, synthetic construct
GGEGSGSPHSKAQNQQ

SEQ ID NO: 2438 - protein, 16 aa, synthetic construct
TINGSGSPHSKAQRMS

SEQ ID NO: 2439 - protein, 16 aa, synthetic construct
TINGSGSPHSKAQGIL

SEQ ID NO: 2440 - protein, 16 aa, synthetic construct
EFVGSGSPHSKAQNQQ

SEQ ID NO: 2441 - protein, 16 aa, synthetic construct
TIIGSGSPHSKAQDRQ

SEQ ID NO: 2442 - protein, 16 aa, synthetic construct
SDKGSGSPHSKAQNQQ

SEQ ID NO: 2443 - protein, 16 aa, synthetic construct
TEQVSGSPHSKAQNQQ

SEQ ID NO: 2444 - protein, 16 aa, synthetic construct
TEHVSGSPHSKAQNQQ

SEQ ID NO: 2445 - protein, 16 aa, synthetic construct
TINGSGSPHSKARDWQ

SEQ ID NO: 2446 - protein, 16 aa, synthetic construct
TENASGSPHSKAQNQQ

SEQ ID NO: 2447 - protein, 16 aa, synthetic construct
EVQGSGSPHSKAQNQQ

SEQ ID NO: 2448 - protein, 16 aa, synthetic construct
TINGSGSPHSKAQNTH

SEQ ID NO: 2449 - protein, 16 aa, synthetic construct
TINGSGSPHSKAPNLQ

SEQ ID NO: 2450 - protein, 16 aa, synthetic construct
TINGSGSPHSKAQERS

SEQ ID NO: 2451 - protein, 16 aa, synthetic construct
TSNGSGSPHSKAQNYQ

SEQ ID NO: 2452 - protein, 16 aa, synthetic construct
TEYISGSPHSKAQNQQ

SEQ ID NO: 2453 - protein, 16 aa, synthetic construct
TINGSGSPHSKAQRTC

SEQ ID NO: 2454 - protein, 16 aa, synthetic construct
TINGSGSPHSKAQIGH

SEQ ID NO: 2455 - protein, 16 aa, synthetic construct
NCWGSGSPHSKAQNQQ

SEQ ID NO: 2456 - protein, 16 aa, synthetic construct
TINGSGSPHSKAQGAI

SEQ ID NO: 2457 - protein, 16 aa, synthetic construct
TDVNSGSPHSKAQNQQ

SEQ ID NO: 2458 - protein, 16 aa, synthetic construct
SDIGSGSPHSKAQNQQ

SEQ ID NO: 2459 - protein, 16 aa, synthetic construct
TINGSGSPHSKAQVPP

SEQ ID NO: 2460 - protein, 16 aa, synthetic construct
TINGSGSPHSKAQVQQ

SEQ ID NO: 2461 - protein, 16 aa, synthetic construct
TINGSGSPHSKALMRQ

SEQ ID NO: 2462 - protein, 16 aa, synthetic construct
TINGSGSPHSKAQYSV

SEQ ID NO: 2463 - protein, 16 aa, synthetic construct
NSIGSGSPHSKAQNQQ

SEQ ID NO: 2464 - protein, 16 aa, synthetic construct
TINGSGSPHSKVPNLQ

SEQ ID NO: 2465 - protein, 16 aa, synthetic construct
AINGSGSPHSKAQSQQ

SEQ ID NO: 2466 - protein, 16 aa, synthetic construct
TINGSGSPHSKAQAIT

SEQ ID NO: 2467 - protein, 16 aa, synthetic construct
TINGSGSPHSKAQKTL

SEQ ID NO: 2468 - protein, 16 aa, synthetic construct
TVNGSGSPHSKAQNQW

SEQ ID NO: 2469 - protein, 16 aa, synthetic construct
TINGSGSPHSKAQLHH

SEQ ID NO: 2470 - protein, 16 aa, synthetic construct
TEQTSGSPHSKAQNQQ

SEQ ID NO: 2471 - protein, 16 aa, synthetic construct
TINGSGSPHSKAQNII

SEQ ID NO: 2472 - protein, 16 aa, synthetic construct
NSLGSGSPHSKAQNQQ

SEQ ID NO: 2473 - protein, 16 aa, synthetic construct
TIPMEGSPHSKAQNQQ

SEQ ID NO: 2474 - protein, 16 aa, synthetic construct
TINGSGSPHSKAQGHH

SEQ ID NO: 2475 - protein, 16 aa, synthetic construct
TDRTSGSPHSKAQNQQ

SEQ ID NO: 2476 - protein, 16 aa, synthetic construct
TINGSGSPHSKAQSKV

SEQ ID NO: 2477 - protein, 16 aa, synthetic construct
EVVGSGSPHSKAQNQQ

SEQ ID NO: 2478 - protein, 16 aa, synthetic construct
TINGSGSPHSKAQLPS

SEQ ID NO: 2479 - protein, 16 aa, synthetic construct
TINGSGSPHSKAIGKQ

SEQ ID NO: 2480 - protein, 16 aa, synthetic construct
TEPTSGSPHSKAQNQQ

SEQ ID NO: 2481 - protein, 16 aa, synthetic construct
TVNGGGSPHSKSQNQQ

SEQ ID NO: 2482 - protein, 16 aa, synthetic construct
TINGSGSPHSKAQAIH

SEQ ID NO: 2483 - protein, 16 aa, synthetic construct
TINGSGSPHSKAQHGL

SEQ ID NO: 2484 - protein, 16 aa, synthetic construct
SELGSGSPHSKAQNQQ

SEQ ID NO: 2485 - protein, 16 aa, synthetic construct
TINGSGSPHSKAQFMC

SEQ ID NO: 2486 - protein, 16 aa, synthetic construct
TINVSGSPHSKAQGQQ

SEQ ID NO: 2487 - protein, 16 aa, synthetic construct
TINGGGSPHSKAQNQM

SEQ ID NO: 2488 - protein, 16 aa, synthetic construct
TVNGSGSPHSKAQHLQ

SEQ ID NO: 2489 - protein, 16 aa, synthetic construct
TIRENGSPHSKAQNQQ

SEQ ID NO: 2490 - protein, 16 aa, synthetic construct
TINGSGSPHSKTQNHQ

SEQ ID NO: 2491 - protein, 16 aa, synthetic construct
TINGSGSPHSKAQPAR

SEQ ID NO: 2492 - protein, 16 aa, synthetic construct
TVNGSGSPHSKAQSLQ

SEQ ID NO: 2493 - protein, 16 aa, synthetic construct
TINGSGSPHSKSQSQL

SEQ ID NO: 2494 - protein, 16 aa, synthetic construct
TINGSASPHSKAHSQQ

SEQ ID NO: 2495 - protein, 16 aa, synthetic construct
TWQNSGSPHSKAQNQQ

SEQ ID NO: 2496 - protein, 16 aa, synthetic construct
TINGSGSPHSKAQDRQ

SEQ ID NO: 2497 - protein, 16 aa, synthetic construct
TINGSGSPHSKAQMPS

SEQ ID NO: 2498 - protein, 16 aa, synthetic construct
TNNGGGSPHSKAQNLQ

SEQ ID NO: 2499 - protein, 16 aa, synthetic construct
TINGSGSPHSKAQGSL

SEQ ID NO: 2500 - protein, 16 aa, synthetic construct
TEVTSGSPHSKAQNQQ

SEQ ID NO: 2501 - protein, 16 aa, synthetic construct
SINGGGSPHSKAQYQQ

SEQ ID NO: 2502 - protein, 16 aa, synthetic construct
TVIGSGSPHSKSQNQQ

SEQ ID NO: 2503 - protein, 16 aa, synthetic construct
AVNVSGSPHSKAQNQQ

SEQ ID NO: 2504 - protein, 16 aa, synthetic construct
TVNGNGSPHSKSQNQQ

SEQ ID NO: 2505 - protein, 16 aa, synthetic construct
TDRNSGSPHSKAQNQQ

SEQ ID NO: 2506 - protein, 16 aa, synthetic construct
TINGSGSPHSKAQVPA

SEQ ID NO: 2507 - RNA, 21 nt, synthetic construct
  source 1..21: mol_type = other RNA
tattaaagtgaggacctgctt

SEQ ID NO: 2508 - protein, 16 aa, synthetic construct
TLNGNGSPHSKAQNLQ

SEQ ID NO: 2509 - protein, 16 aa, synthetic construct
AINGSGSPHSKAQDKQ

SEQ ID NO: 2510 - protein, 16 aa, synthetic construct
TSNGSGSPHSKAHYQQ

SEQ ID NO: 2511 - protein, 16 aa, synthetic construct
TINGSGSPHSKAQVPS

SEQ ID NO: 2512 - protein, 16 aa, synthetic construct
TELRSGSPHSKAQNQQ

SEQ ID NO: 2513 - protein, 16 aa, synthetic construct
NINGSGSPHSKAQNHQ

SEQ ID NO: 2514 - protein, 16 aa, synthetic construct
TVNGGGSPHSKAQNHQ

SEQ ID NO: 2515 - protein, 16 aa, synthetic construct
TINGSGSPHSKARGEQ

SEQ ID NO: 2516 - protein, 16 aa, synthetic construct
TINGGGSPHSKAQYQH

SEQ ID NO: 2517 - protein, 16 aa, synthetic construct
TEDLSGSPHSKAQNQQ

SEQ ID NO: 2518 - protein, 16 aa, synthetic construct
TINGSGSPHSKAPGQQ

SEQ ID NO: 2519 - protein, 16 aa, synthetic construct
TIPKNGSPHSKAQNQQ

SEQ ID NO: 2520 - protein, 16 aa, synthetic construct
TINGSGSPHSKAQSLQ

SEQ ID NO: 2521 - protein, 16 aa, synthetic construct
TINGSGSPHSKRLEQQ

SEQ ID NO: 2522 - protein, 16 aa, synthetic construct
TERGSGSPHSKAQNQQ

SEQ ID NO: 2523 - protein, 16 aa, synthetic construct
TVNGSGSPHSKAPNQQ

SEQ ID NO: 2524 - protein, 16 aa, synthetic construct
TSNGSGSPHSKAQNQS

SEQ ID NO: 2525 - RNA, 21 nt, synthetic construct
  source 1..21: mol_type = other RNA
gcaggtcctcactttaatgct

SEQ ID NO: 2526 - protein, 16 aa, synthetic construct
TEGISGSPHSKAQNQQ

SEQ ID NO: 2527 - protein, 16 aa, synthetic construct
TINGSGSPHSKAQNND

SEQ ID NO: 2528 - protein, 16 aa, synthetic construct
TINGSGSPHSKAQSVH

SEQ ID NO: 2529 - protein, 16 aa, synthetic construct
TINGSGSPHSKAQPLG

SEQ ID NO: 2530 - protein, 16 aa, synthetic construct
TINKEGSPHSKAQNQQ

SEQ ID NO: 2531 - protein, 16 aa, synthetic construct
TCNASGSPHSKAQNQQ

SEQ ID NO: 2532 - protein, 16 aa, synthetic construct
AINGSGSPHSKAHNQE

SEQ ID NO: 2533 - protein, 16 aa, synthetic construct
TEGLSGSPHSKAQNQQ

SEQ ID NO: 2534 - protein, 16 aa, synthetic construct
TRDASGSPHSKAQNQQ

SEQ ID NO: 2535 - protein, 16 aa, synthetic construct
TSNGSGSPHSKAQNLQ

SEQ ID NO: 2536 - protein, 16 aa, synthetic construct
TGNGSGSPHSKAQIQQ

SEQ ID NO: 2537 - protein, 16 aa, synthetic construct
TVNGGGSPHSKAQNLQ

SEQ ID NO: 2538 - protein, 16 aa, synthetic construct
TDRSSGSPHSKAQNQQ

SEQ ID NO: 2539 - protein, 16 aa, synthetic construct
TINGSGSPHSKAQVRN

SEQ ID NO: 2540 - protein, 16 aa, synthetic construct
TINGSGSPHSKAPSNQ

SEQ ID NO: 2541 - protein, 16 aa, synthetic construct
TINGSGSPHSKAQVGH

SEQ ID NO: 2542 - protein, 16 aa, synthetic construct
NAIGSGSPHSKAQNQQ

SEQ ID NO: 2543 - protein, 16 aa, synthetic construct
AENGSGSPHSKAQNQQ

SEQ ID NO: 2544 - protein, 16 aa, synthetic construct
TINGSGSPHSKAQRDI

SEQ ID NO: 2545 - protein, 16 aa, synthetic construct
TINGSGSPHSKAQMPN

SEQ ID NO: 2546 - protein, 16 aa, synthetic construct
TVNGSGSPHSKSQNQQ

SEQ ID NO: 2547 - DNA, 30 bp, synthetic construct
  source 1..30: mol_type = other DNA
ctcccgcagaacaccatgcgctccacggaa

SEQ ID NO: 2548 - DNA, 100 bp, synthetic construct
  source 1..100: mol_type = other DNA
gaagcaaagaaggggcagagggagcccgtgagctgagtgggccagggactgggagaaggagtgaggaggcagggccggcatgcctctgctgctggccaga

SEQ ID NO: 2549 - DNA, 54 bp, synthetic construct
  source 1..54: mol_type = other DNA
gtgctgggcggggggcggcgggccctcccgcagaacaccatgcgctcttcggaa

SEQ ID NO: 2550 - DNA, 15 bp, synthetic construct
  source 1..15: mol_type = other DNA
gtggccactgagaag

SEQ ID NO: 2551 - DNA, 18 bp, synthetic construct
  source 1..18: mol_type = other DNA
gtctgcacctgtcactag

SEQ ID NO: 2552 - DNA, 10 bp, synthetic construct
  source 1..10: mol_type = other DNA
tgtgacctgg

SEQ ID NO: 2553 - DNA, 10 bp, synthetic construct
  source 1..10: mol_type = other DNA
tgtgatttgg

SEQ ID NO: 2554 - DNA, 35 bp, synthetic construct
  source 1..35: mol_type = other DNA
ctgaggagcgccttgacagcagccatgggagggcc

SEQ ID NO: 2555 - DNA, 100 bp, synthetic construct
  source 1..100: mol_type = other DNA
tggccgtgtagtgctacccagcgctggctgcctcctcagcattgcaattcctctcccatctgggcaccagtcagctaccctggtgggaatctgggtagcc

SEQ ID NO: 2556 - DNA, 99 bp, synthetic construct
  source 1..99: mol_type = other DNA
ggccgtgtagtgctacccagcgctggctgcctcctcagcattgcaattcctctcccatctgggcaccagtcagctaccctggtgggaatctgggtagcc

SEQ ID NO: 2557 - DNA, 52 bp, synthetic construct
  source 1..52: mol_type = other DNA
ctgaggagcgccttgacagcagccatgggagggccgccccctacctcagtga

SEQ ID NO: 2558 - DNA, 52 bp, synthetic construct
  source 1..52: mol_type = other DNA
ctgtggagcgccttgacagcagccatgggagggccgccccctacctcagtga

SEQ ID NO: 2559 - DNA, 158 bp, synthetic construct
  source 1..158: mol_type = other DNA
gtgctgggcggggggcggcgggccctcccgcagaacaccatgcgctcttcggaagcaggtcctcactttaatgcctgtgacctgggattaaagtgaggacctgcttctgaggagcgccttgacagcagccatgggagggccgccccctacctcagtga

SEQ ID NO: 2560 - DNA, 158 bp, synthetic construct
  source 1..158: mol_type = other DNA
gtgctgggcggggggcggcgggccctcccgcagaacaccatgcgctcttcggaaggcaatgtgactgctggcccctgtgacctggtgccagcagtcacattgccttctgaggagcgccttgacagcagccatgggagggccgccccctacctcagtga

SEQ ID NO: 2561 - DNA, 158 bp, synthetic construct
  source 1..158: mol_type = other DNA
gtgctgggcggggggcggcgggccctcccgcagaacaccatgcgctcttcggaagcaggtcctcactttaattcctgtgacctgggattaaagtgaggacctgcttctgaggagcgccttgacagcagccatgggagggccgccccctacctcagtga

SEQ ID NO: 2562 - DNA, 122 bp, synthetic construct
  source 1..122: mol_type = other DNA
ctcccgcagaacaccatgcgctccacggaagcaggtcctcactttaatgctgtggccactgagaagtattaaagtgaggacctgcttctgaggagcgccttgacagcagccatgggagggcc

SEQ ID NO: 2563 - DNA, 122 bp, synthetic construct
  source 1..122: mol_type = other DNA
ctcccgcagaacaccatgcgctccacggaacaggtcctcactttaatcgctgtggccactgagaagtgattaaagtgaggacctgttctgaggagcgccttgacagcagccatgggagggcc

SEQ ID NO: 2564 - DNA, 158 bp, synthetic construct
  source 1..158: mol_type = other DNA
gtgctgggcggggggcggcgggccctcccgcagaacaccatgcgctcttcggaaggcaatgtgactgctggtgcctgtgacctggtgccagcagtcacattgccttctgaggagcgccttgacagcagccatgggagggccgccccctacctcagtga

SEQ ID NO: 2565 - DNA, 122 bp, synthetic construct
  source 1..122: mol_type = other DNA
ctcccgcagaacaccatgcgctccacggaagtcgtttggcttgtggtggctgtggccactgagaagtcaccacaagccaaacgacttctgaggagcgccttgacagcagccatgggagggcc

SEQ ID NO: 2566 - DNA, 122 bp, synthetic construct
  source 1..122: mol_type = other DNA
ctcccgcagaacaccatgcgctccacggaatcgtttggcttgtggtgtgctgtggccactgagaagtacaccacaagccaaacgattctgaggagcgccttgacagcagccatgggagggcc

SEQ ID NO: 2567 - DNA, 158 bp, synthetic construct
  source 1..158: mol_type = other DNA
gtgctgggcggggggcggcgggccctcccgcagaacaccatgcgctcttcggaagcaggtcctcactttaatccctgtgatttgggattaaagtgaggacctgcttctgaggagcgccttgacagcagccatgggagggccgccccctacctcagtga

SEQ ID NO: 2568 - DNA, 158 bp, synthetic construct
  source 1..158: mol_type = other DNA
gtgctgggcggggggcggcgggccctcccgcagaacaccatgcgctcttcggaaggcaatgtgactgctggtacctgtgatttggtgccagcagtcacattgccttctgaggagcgccttgacagcagccatgggagggccgccccctacctcagtga

SEQ ID NO: 2569 - DNA, 158 bp, synthetic construct
  source 1..158: mol_type = other DNA
gtgctgggcggggggcggcgggccctcccgcagaacaccatgcgctcttcggaagcaggtcctgactttaatccctgtgacctgggattaaagtgaggacctgcttctgtggagcgccttgacagcagccatgggagggccgccccctacctcagtga

SEQ ID NO: 2570 - DNA, 158 bp, synthetic construct
  source 1..158: mol_type = other DNA
gtgctgggcggggggcggcgggccctcccgcagaacaccatgcgctcttcggaaggcaatgtgtctgctggtacctgtgacctggtgccagcagtcacattgccttctgtggagcgccttgacagcagccatgggagggccgccccctacctcagtga

SEQ ID NO: 2571 - DNA, 158 bp, synthetic construct
  source 1..158: mol_type = other DNA
gtgctgggcggggggcggcgggccctcccgcagaacaccatgcgctcttcggaagcaggtcctcactttaatccctgtgacctgggattaaagtgaggacctgcttctgtggagcgccttgacagcagccatgggagggccgccccctacctcagtga

SEQ ID NO: 2572 - DNA, 158 bp, synthetic construct
  source 1..158: mol_type = other DNA
gtgctgggcggggggcggcgggccctcccgcagaacaccatgcgctcttcggaaggcaatgtgactgctggtacctgtgacctggtgccagcagtcacattgccttctgtggagcgccttgacagcagccatgggagggccgccccctacctcagtga

SEQ ID NO: 2573 - DNA, 260 bp, synthetic construct
  source 1..260: mol_type = other DNA
gaagcaaagaaggggcagagggagcccgtgagctgagtgggccagggactgggagaaggagtgaggaggcagggccggcatgcctctgctgctggccagagcaggtcctcactttaatcccgtctgcacctgtcactaggattaaagtgaggacctgctttggccgtgtagtgctacccagcgctggctgcctcctcagcattgcaattcctctcccatctgggcaccagtcagctaccctggtgggaatctgggtagcc

SEQ ID NO: 2574 - DNA, 260 bp, synthetic construct
  source 1..260: mol_type = other DNA
gaagcaaagaaggggcagagggagcccgtgagctgagtgggccagggactgggagaaggagtgaggaggcagggccggcatgcctctgctgctggccagagcaggtcctcactttaatgccgtctgcacctgtcactagtattaaagtgaggacctgctttggccgtgtagtgctacccagcgctggctgcctcctcagcattgcaattcctctcccatctgggcaccagtcagctaccctggtgggaatctgggtagcc

SEQ ID NO: 2575 - DNA, 260 bp, synthetic construct
  source 1..260: mol_type = other DNA
gaagcaaagaaggggcagagggagcccgtgagctgagtgggccagggactgggagaaggagtgaggaggcagggccggcatgcctctgctgctggccagacaggtcctcactttaatcgccgtctgcacctgtcactagtgattaaagtgaggacctgtttggccgtgtagtgctacccagcgctggctgcctcctcagcattgcaattcctctcccatctgggcaccagtcagctaccctggtgggaatctgggtagcc

SEQ ID NO: 2576 - DNA, 260 bp, synthetic construct
  source 1..260: mol_type = other DNA
gaagcaaagaaggggcagagggagcccgtgagctgagtgggccagggactgggagaaggagtgaggaggcagggccggcatgcctctgctgctggccagaggcaatgtgactgctggtaccgtctgcacctgtcactagtgccagcagtcacattgcctttggccgtgtagtgctacccagcgctggctgcctcctcagcattgcaattcctctcccatctgggcaccagtcagctaccctggtgggaatctgggtagcc

SEQ ID NO: 2577 - DNA, 260 bp, synthetic construct
  source 1..260: mol_type = other DNA
gaagcaaagaaggggcagagggagcccgtgagctgagtgggccagggactgggagaaggagtgaggaggcagggccggcatgcctctgctgctggccagagtcgtttggcttgtggtggccgtctgcacctgtcactagtcaccacaagccaaacgactttggccgtgtagtgctacccagcgctggctgcctcctcagcattgcaattcctctcccatctgggcaccagtcagctaccctggtgggaatctgggtagcc

SEQ ID NO: 2578 - DNA, 260 bp, synthetic construct
  source 1..260: mol_type = other DNA
gaagcaaagaaggggcagagggagcccgtgagctgagtgggccagggactgggagaaggagtgaggaggcagggccggcatgcctctgctgctggccagatcgtttggcttgtggtgtgccgtctgcacctgtcactagtacaccacaagccaaacgatttggccgtgtagtgctacccagcgctggctgcctcctcagcattgcaattcctctcccatctgggcaccagtcagctaccctggtgggaatctgggtagcc

SEQ ID NO: 2579 - DNA, 260 bp, synthetic construct
  source 1..260: mol_type = other DNA
gaagcaaagaaggggcagagggagcccgtgagctgagtgggccagggactgggagaaggagtgaggaggcagggccggcatgcctctgctgctggccagaccccttaactcatttgttcccgtctgcacctgtcactagtaacagatgagttaaggggtttggccgtgtagtgctacccagcgctggctgcctcctcagcattgcaattcctctcccatctgggcaccagtcagctaccctggtgggaatctgggtagcc

SEQ ID NO: 2580 - protein, 16 aa, synthetic construct
TINGSGSPHSKAGDSQ

SEQ ID NO: 2581 - protein, 16 aa, synthetic construct
TINGSGSPHSKLKSQQ

SEQ ID NO: 2582 - protein, 16 aa, synthetic construct
TINGSGSPHSKAQKIS

SEQ ID NO: 2583 - protein, 16 aa, synthetic construct
TEYNSGSPHSKAQNQQ

SEQ ID NO: 2584 - protein, 16 aa, synthetic construct
TINGSGSPHSKAPSMQ

SEQ ID NO: 2585 - protein, 16 aa, synthetic construct
AINGSGSPHSKAQNQQ

SEQ ID NO: 2586 - protein, 16 aa, synthetic construct
TINGSGSPHSKASPRQ

SEQ ID NO: 2587 - protein, 16 aa, synthetic construct
TINGSGSPHSKRMEQQ

SEQ ID NO: 2588 - protein, 16 aa, synthetic construct
TINGSGSPHSKAQYQN

SEQ ID NO: 2589 - protein, 16 aa, synthetic construct
TINGSGSPHSKAQYYV

SEQ ID NO: 2590 - protein, 16 aa, synthetic construct
TINGSGSPHSKLRRQQ

SEQ ID NO: 2591 - protein, 16 aa, synthetic construct
TINGSGSPHSKAGCGQ

SEQ ID NO: 2592 - protein, 16 aa, synthetic construct
SMNGSGSPHSRAQNQQ

SEQ ID NO: 2593 - protein, 16 aa, synthetic construct
TINGSGSPHSKRLRQQ

SEQ ID NO: 2594 - protein, 16 aa, synthetic construct
TINGSGSPHSLRRNQQ

SEQ ID NO: 2595 - protein, 16 aa, synthetic construct
TINGSGSPHSRGRNQQ

SEQ ID NO: 2596 - protein, 16 aa, synthetic construct
TINGSGSPHSSRRNQQ

SEQ ID NO: 2597 - protein, 16 aa, synthetic construct
TINGSGSPHSKAFRLQ

SEQ ID NO: 2598 - protein, 16 aa, synthetic construct
TINGSCSPHRKAQNQQ

SEQ ID NO: 2599 - protein, 16 aa, synthetic construct
TINGSGSPHFLRQNQQ

SEQ ID NO: 2600 - protein, 16 aa, synthetic construct
TINGSGSPHSLRFNQQ

SEQ ID NO: 2601 - protein, 16 aa, synthetic construct
TINGSGSPHSKWLLQQ

SEQ ID NO: 2602 - protein, 16 aa, synthetic construct
TINGSGSPHSKRRLQQ

SEQ ID NO: 2603 - protein, 16 aa, synthetic construct
TINGSGSPHSKAQRKL

SEQ ID NO: 2604 - protein, 16 aa, synthetic construct
TINGSGSPHSKALRRQ

SEQ ID NO: 2605 - protein, 16 aa, synthetic construct
TINGSGSPHSKAQRLR

SEQ ID NO: 2606 - protein, 16 aa, synthetic construct
YLSGSGSPHSKAQNQQ

SEQ ID NO: 2607 - protein, 16 aa, synthetic construct
TINGSGSPHSKAQRRL

SEQ ID NO: 2608 - protein, 16 aa, synthetic construct
TINGSGSPHSKARRQQ

SEQ ID NO: 2609 - protein, 16 aa, synthetic construct
TINGSGSPHSKARRLQ

SEQ ID NO: 2610 - protein, 16 aa, synthetic construct
TINGSGSPHSKSRRQQ

SEQ ID NO: 2611 - protein, 16 aa, synthetic construct
TINGLLSPHWKAQNQQ

SEQ ID NO: 2612 - protein, 16 aa, synthetic construct
TINGSGSPHSKARLRQ

SEQ ID NO: 2613 - protein, 16 aa, synthetic construct
TINGSGSPHSKASKRQ

SEQ ID NO: 2614 - protein, 16 aa, synthetic construct
TINGSGSPHVRRQNQQ

SEQ ID NO: 2615 - protein, 16 aa, synthetic construct
TINGSGSPHSKAQLYR

SEQ ID NO: 2616 - protein, 16 aa, synthetic construct
GLSGSGSPHSKAQNQQ

SEQ ID NO: 2617 - protein, 16 aa, synthetic construct
TINGSGSPHSKAQLTV

SEQ ID NO: 2618 - protein, 16 aa, synthetic construct
TINGHDSPHKRGQHRQ

SEQ ID NO: 2619 - protein, 16 aa, synthetic construct
MPEGHDSPHKSGQNQQ

SEQ ID NO: 2620 - protein, 16 aa, synthetic construct
MEGGHDSPHKSGQNQQ

SEQ ID NO: 2621 - protein, 16 aa, synthetic construct
MEYGHDSPHKSGQNQQ

SEQ ID NO: 2622 - protein, 16 aa, synthetic construct
AEWGHDSPHKSGQNQQ

SEQ ID NO: 2623 - protein, 16 aa, synthetic construct
CEWGHDSPHKSGQNQQ

SEQ ID NO: 2624 - protein, 16 aa, synthetic construct
ANNGQDSPHKSGQNQQ

SEQ ID NO: 2625 - protein, 16 aa, synthetic construct
IPEGHDSPHKSGQNQQ

SEQ ID NO: 2626 - protein, 16 aa, synthetic construct
ADMGHDSPHKSGQNQQ

SEQ ID NO: 2627 - protein, 16 aa, synthetic construct
IEYGHDSPHKSGQNQQ

SEQ ID NO: 2628 - protein, 16 aa, synthetic construct
ADYGHDSPHKSGQNQQ

SEQ ID NO: 2629 - protein, 16 aa, synthetic construct
IETGHDSPHKSGQNQQ

SEQ ID NO: 2630 - protein, 16 aa, synthetic construct
MEWGHDSPHKSGQNQQ

SEQ ID NO: 2631 - protein, 16 aa, synthetic construct
CEYGHDSPHKSGQNQQ

SEQ ID NO: 2632 - protein, 16 aa, synthetic construct
RINGHDSPHKSGQKQQ

SEQ ID NO: 2633 - protein, 16 aa, synthetic construct
MEIGHDSPHKSGQNQQ

SEQ ID NO: 2634 - protein, 16 aa, synthetic construct
LEYGHDSPHKSGQNQQ

SEQ ID NO: 2635 - protein, 16 aa, synthetic construct
ADWGHDSPHKSGQNQQ

SEQ ID NO: 2636 - protein, 16 aa, synthetic construct
IEIGHDSPHKSGQNQQ

SEQ ID NO: 2637 - protein, 16 aa, synthetic construct
DIMGHDSPHKSGQNQQ

SEQ ID NO: 2638 - protein, 16 aa, synthetic construct
FEQGHDSPHKSGQNQQ

SEQ ID NO: 2639 - protein, 16 aa, synthetic construct
MEFGHDSPHKSGQNQQ

SEQ ID NO: 2640 - protein, 16 aa, synthetic construct
CDQGHDSPHKSGQNQQ

SEQ ID NO: 2641 - protein, 16 aa, synthetic construct
LPEGHDSPHKSGQNQQ

SEQ ID NO: 2642 - protein, 16 aa, synthetic construct
IENGHDSPHKSGQNQQ

SEQ ID NO: 2643 - protein, 16 aa, synthetic construct
MESGHDSPHKSGQNQQ

SEQ ID NO: 2644 - protein, 16 aa, synthetic construct
AEIGHDSPHKSGQNQQ

SEQ ID NO: 2645 - protein, 16 aa, synthetic construct
VEYGHDSPHKSGQNQQ

SEQ ID NO: 2646 - protein, 16 aa, synthetic construct
IINGHDSPHKSGLTQQ

SEQ ID NO: 2647 - protein, 16 aa, synthetic construct
TSNGDDSPHKSGRNQQ

SEQ ID NO: 2648 - protein, 16 aa, synthetic construct
IEVGHDSPHKSGQNQQ

SEQ ID NO: 2649 - protein, 16 aa, synthetic construct
MEMGHDSPHKSGQNQQ

SEQ ID NO: 2650 - protein, 16 aa, synthetic construct
AEVGHDSPHKSGQNQQ

SEQ ID NO: 2651 - protein, 16 aa, synthetic construct
MDAGHDSPHKSGQNQQ

SEQ ID NO: 2652 - protein, 16 aa, synthetic construct
VEWGHDSPHKSGQNQQ

SEQ ID NO: 2653 - protein, 16 aa, synthetic construct
AEQGHDSPHKSGQNQQ

SEQ ID NO: 2654 - protein, 16 aa, synthetic construct
LEWGHDSPHKSGQNQQ

SEQ ID NO: 2655 - protein, 16 aa, synthetic construct
MELGHDSPHKSGQNQQ

SEQ ID NO: 2656 - protein, 16 aa, synthetic construct
METGHDSPHKSGQNQQ

SEQ ID NO: 2657 - protein, 16 aa, synthetic construct
MEAGHDSPHKSGQNQQ

SEQ ID NO: 2658 - protein, 16 aa, synthetic construct
IESGHDSPHKSGQNQQ

SEQ ID NO: 2659 - protein, 16 aa, synthetic construct
MEVGHDSPHKSGQNQQ

SEQ ID NO: 2660 - protein, 16 aa, synthetic construct
CEIGHDSPHKSGQNQQ

SEQ ID NO: 2661 - protein, 16 aa, synthetic construct
ATNGHDSPHKSGLNQQ

SEQ ID NO: 2662 - protein, 16 aa, synthetic construct
MDGGHDSPHKSGQNQQ

SEQ ID NO: 2663 - protein, 16 aa, synthetic construct
QEVGHDSPHKSGQNQQ

SEQ ID NO: 2664 - protein, 16 aa, synthetic construct
ADQGHDSPHKSGQNQQ

SEQ ID NO: 2665 - protein, 16 aa, synthetic construct
TINGHESPHKSAQNHQ

SEQ ID NO: 2666 - protein, 16 aa, synthetic construct
TINGHDSPHKSAQNQW

SEQ ID NO: 2667 - protein, 16 aa, synthetic construct
NMNGHDSPHKSGQNTH

SEQ ID NO: 2668 - protein, 16 aa, synthetic construct
IEMGHDSPHKSGQNQQ

SEQ ID NO: 2669 - protein, 16 aa, synthetic construct
TINGHDSPHKSGRRRQ

SEQ ID NO: 2670 - protein, 16 aa, synthetic construct
ISNGHDSPHKSAQNQQ

SEQ ID NO: 2671 - protein, 16 aa, synthetic construct
TGNGHDSPHKSGQYQQ

SEQ ID NO: 2672 - protein, 16 aa, synthetic construct
TINGNYSPHKIGQNQQ

SEQ ID NO: 2673 - protein, 16 aa, synthetic construct
TINGHDSPHKSRQNDQ

SEQ ID NO: 2674 - protein, 16 aa, synthetic construct
QQQGHDSPHKSGQNQQ

SEQ ID NO: 2675 - protein, 16 aa, synthetic construct
HDWGHDSPHKSGQNQQ

SEQ ID NO: 2676 - protein, 16 aa, synthetic construct
IEGGHDSPHKSGQNQQ

SEQ ID NO: 2677 - protein, 16 aa, synthetic construct
TFNRSGSPHSKAQNQQ

SEQ ID NO: 2678 - protein, 16 aa, synthetic construct
AINGHDSPHKSGQIRQ

SEQ ID NO: 2679 - protein, 16 aa, synthetic construct
TINGHDSPHKIGQNQH

SEQ ID NO: 2680 - protein, 16 aa, synthetic construct
AINGYDSPHKSGQKQQ

SEQ ID NO: 2681 - protein, 16 aa, synthetic construct
TESGHDSPHKSGQNQQ

SEQ ID NO: 2682 - protein, 16 aa, synthetic construct
TINGHDSPHKSGQSVQ

SEQ ID NO: 2683 - protein, 16 aa, synthetic construct
TINGHESPHKSGRSQQ

SEQ ID NO: 2684 - protein, 16 aa, synthetic construct
TINGHDSPHKSGQNKL

SEQ ID NO: 2685 - protein, 16 aa, synthetic construct
TINGHDSPHKTGQNQQ

SEQ ID NO: 2686 - protein, 16 aa, synthetic construct
TINGRGSPHKRGQNQQ

SEQ ID NO: 2687 - protein, 16 aa, synthetic construct
TINGSGSPHTKAQNPP

SEQ ID NO: 2688 - protein, 16 aa, synthetic construct
TINGQDSPHKSGQHQQ

SEQ ID NO: 2689 - protein, 16 aa, synthetic construct
SINGHDSPHKSGQIQH

SEQ ID NO: 2690 - protein, 16 aa, synthetic construct
AINGHDSPHKSGPRQQ

SEQ ID NO: 2691 - protein, 16 aa, synthetic construct
TVNGHDSPHKSGHTQQ

SEQ ID NO: 2692 - protein, 16 aa, synthetic construct
SINGHDSPHKSGQRQH

SEQ ID NO: 2693 - protein, 16 aa, synthetic construct
SLNGSGSPHTKAQNQQ

SEQ ID NO: 2694 - protein, 16 aa, synthetic construct
AINGHDSPHKSAQSQQ

SEQ ID NO: 2695 - protein, 16 aa, synthetic construct
SIYGHESPHKSGQNQQ

SEQ ID NO: 2696 - protein, 16 aa, synthetic construct
TVNGHDSPHKSLQNQQ

SEQ ID NO: 2697 - protein, 16 aa, synthetic construct
TINGHGSPHSKAQNPQ

SEQ ID NO: 2698 - protein, 16 aa, synthetic construct
TSNGYDSPHKSGQKQQ

SEQ ID NO: 2699 - protein, 16 aa, synthetic construct
TVNGHDSPHKSGRNQE

SEQ ID NO: 2700 - protein, 16 aa, synthetic construct
TTNGHDSPHKSGQTQL

SEQ ID NO: 2701 - protein, 16 aa, synthetic construct
AINGHDSPHKSEKNQQ

SEQ ID NO: 2702 - protein, 16 aa, synthetic construct
IINGRDSPHKSGQDQQ

SEQ ID NO: 2703 - protein, 16 aa, synthetic construct
TISGHDSPHKTGHNQQ

SEQ ID NO: 2704 - protein, 16 aa, synthetic construct
SINGYDSPHKSGQTQQ

SEQ ID NO: 2705 - protein, 16 aa, synthetic construct
TINGHESPHKSGQTQQ

SEQ ID NO: 2706 - protein, 16 aa, synthetic construct
TINGHDSPHKSGQSKQ

SEQ ID NO: 2707 - protein, 16 aa, synthetic construct
AIIGHESPHKSGQNQQ

SEQ ID NO: 2708 - protein, 16 aa, synthetic construct
TINGHDSPHKTGQNQP

SEQ ID NO: 2709 - protein, 16 aa, synthetic construct
AINGHDSPHKSGQSPQ

SEQ ID NO: 2710 - protein, 16 aa, synthetic construct
TIKGNDSPHKSVQNQQ

SEQ ID NO: 2711 - protein, 16 aa, synthetic construct
TEFGHDSPHKSGQNQQ

SEQ ID NO: 2712 - protein, 16 aa, synthetic construct
TINGHDSPHKSAQNYQ

SEQ ID NO: 2713 - protein, 16 aa, synthetic construct
TFNGSASPHSKALNQQ

SEQ ID NO: 2714 - protein, 16 aa, synthetic construct
TINGHESPHKSAQNRQ

SEQ ID NO: 2715 - protein, 16 aa, synthetic construct
TTNGHDSPHKSGQNQQ

SEQ ID NO: 2716 - protein, 16 aa, synthetic construct
TIKGQDSPHKIGQNQQ

SEQ ID NO: 2717 - protein, 16 aa, synthetic construct
TVNGHDSPHKSGQNHL

SEQ ID NO: 2718 - protein, 16 aa, synthetic construct
SINGHDSPHKSGQYQH

SEQ ID NO: 2719 - protein, 16 aa, synthetic construct
TINGNDSPHKSVQNHQ

SEQ ID NO: 2720 - protein, 16 aa, synthetic construct
TITGHDSPHKSGQNQW

SEQ ID NO: 2721 - protein, 16 aa, synthetic construct
TNNGHDSPHKSVQNQH

SEQ ID NO: 2722 - protein, 16 aa, synthetic construct
TIDGHDSPHKSGQNQH

SEQ ID NO: 2723 - protein, 16 aa, synthetic construct
TVNGHDSPHKSGQTRQ

SEQ ID NO: 2724 - protein, 16 aa, synthetic construct
TVNGHDSPHKSGQNLH

SEQ ID NO: 2725 - protein, 16 aa, synthetic construct
AISGHDSPHKSGLNQQ

SEQ ID NO: 2726 - protein, 16 aa, synthetic construct
AINGHDSPHKSAQNQE

SEQ ID NO: 2727 - protein, 16 aa, synthetic construct
TITGHDSPHKSGQHLQ

SEQ ID NO: 2728 - protein, 16 aa, synthetic construct
TINGHDSPHKSRLNQP

SEQ ID NO: 2729 - protein, 16 aa, synthetic construct
TVDGHDSPHKSGQKQQ

SEQ ID NO: 2730 - protein, 16 aa, synthetic construct
TINGQDSPHKSGQNQD

SEQ ID NO: 2731 - protein, 16 aa, synthetic construct
TIEGHDSPHKSGRNQQ

SEQ ID NO: 2732 - protein, 16 aa, synthetic construct
TTNGHDSPHKSGQNLL

SEQ ID NO: 2733 - protein, 16 aa, synthetic construct
TINGHDSPHKSGQLVI

SEQ ID NO: 2734 - protein, 16 aa, synthetic construct
TVNGHDSPHKSRQSQQ

SEQ ID NO: 2735 - protein, 16 aa, synthetic construct
TINGHDSPHKSGRTQE

SEQ ID NO: 2736 - protein, 16 aa, synthetic construct
TINGHDSPHKSVQTHQ

SEQ ID NO: 2737 - protein, 16 aa, synthetic construct
TSNGHDSPHKSGQNQP

SEQ ID NO: 2738 - protein, 16 aa, synthetic construct
VINGHDSPHKSGQTQQ

SEQ ID NO: 2739 - protein, 16 aa, synthetic construct
TINGPDSPHKIGQNQQ

SEQ ID NO: 2740 - protein, 16 aa, synthetic construct
AVNGHDSPHKSVQNQQ

SEQ ID NO: 2741 - protein, 16 aa, synthetic construct
TINGHDSPHKSRQDQH

SEQ ID NO: 2742 - protein, 16 aa, synthetic construct
AINGPDSPHKSGQKQQ

SEQ ID NO: 2743 - protein, 16 aa, synthetic construct
TINGHDSPHKSRQSQH

SEQ ID NO: 2744 - protein, 16 aa, synthetic construct
TIYGHDSPHKSVQNQL

SEQ ID NO: 2745 - protein, 16 aa, synthetic construct
TVNGHDSPHKSGQNLL

SEQ ID NO: 2746 - protein, 16 aa, synthetic construct
TENKSGSPHSKAQNQQ

SEQ ID NO: 2747 - protein, 16 aa, synthetic construct
TTNGQDSPHKSGQNQQ

SEQ ID NO: 2748 - protein, 16 aa, synthetic construct
TDKGSGSPHSKAQNQQ

SEQ ID NO: 2749 - protein, 16 aa, synthetic construct
TIDGHDSPHKSGRNQQ

SEQ ID NO: 2750 - protein, 16 aa, synthetic construct
TINGYDSPHKSGQYQH

SEQ ID NO: 2751 - protein, 16 aa, synthetic construct
TDNGHDSPHKSRQNQQ

SEQ ID NO: 2752 - protein, 16 aa, synthetic construct
TINGHDSPHKSWVRQQ

SEQ ID NO: 2753 - protein, 16 aa, synthetic construct
TINGHESPHKSGQNQH

SEQ ID NO: 2754 - protein, 16 aa, synthetic construct
TVNGHDSPHKIGHNQQ

SEQ ID NO: 2755 - protein, 16 aa, synthetic construct
TCNGHDSPHKSGRNQQ

SEQ ID NO: 2756 - protein, 16 aa, synthetic construct
TINGNGSPHSKAQNHQ

SEQ ID NO: 2757 - protein, 16 aa, synthetic construct
NVVGHDSPHKSGQNQQ

SEQ ID NO: 2758 - protein, 16 aa, synthetic construct
TINGHDSPHKSNAWQQ

SEQ ID NO: 2759 - protein, 16 aa, synthetic construct
TDAGHDSPHKSGQNQQ

SEQ ID NO: 2760 - protein, 16 aa, synthetic construct
TEVGHDSPHKSGQNQQ

SEQ ID NO: 2761 - protein, 16 aa, synthetic construct
SELGHDSPHKSGQNQQ

SEQ ID NO: 2762 - protein, 16 aa, synthetic construct
TINGHDSPHKSGQSVP

SEQ ID NO: 2763 - protein, 16 aa, synthetic construct
TINGHESPHKSGQNIQ

SEQ ID NO: 2764 - protein, 16 aa, synthetic construct
TINGHDSPHKSVQNHL

SEQ ID NO: 2765 - protein, 16 aa, synthetic construct
TINGHDSPHKIGLDQQ

SEQ ID NO: 2766 - protein, 16 aa, synthetic construct
TSNASGSPHSKAQHQQ

SEQ ID NO: 2767 - protein, 16 aa, synthetic construct
TINGHDSPHKRGPDQQ

SEQ ID NO: 2768 - protein, 16 aa, synthetic construct
TINGMGSPHSKTQNQQ

SEQ ID NO: 2769 - protein, 16 aa, synthetic construct
TIKGHDSPHKSGESQQ

SEQ ID NO: 2770 - protein, 16 aa, synthetic construct
TINGHDSPHKHGQNHQ

SEQ ID NO: 2771 - protein, 16 aa, synthetic construct
TVNGTGSPHSKAQNQL

SEQ ID NO: 2772 - protein, 16 aa, synthetic construct
TIIGHDSPHKSGQYQH

SEQ ID NO: 2773 - protein, 16 aa, synthetic construct
TSNGHDSPHKSVQNKQ

SEQ ID NO: 2774 - protein, 16 aa, synthetic construct
IVNGQVSPHKSGQNQQ

SEQ ID NO: 2775 - protein, 16 aa, synthetic construct
TVNGHDSPHKSGQRQL

SEQ ID NO: 2776 - protein, 16 aa, synthetic construct
TVNGHDSPHKIGQNQL

SEQ ID NO: 2777 - protein, 16 aa, synthetic construct
TINGHDSPHKSGQIIV

SEQ ID NO: 2778 - protein, 16 aa, synthetic construct
IGNGHESPHKSGQNQQ

SEQ ID NO: 2779 - protein, 16 aa, synthetic construct
EVMGHDSPHKSGQNQQ

SEQ ID NO: 2780 - protein, 16 aa, synthetic construct
TINGYDSPHKSGQKQS

SEQ ID NO: 2781 - protein, 16 aa, synthetic construct
TIHGNGSPHSKAQNQE

SEQ ID NO: 2782 - protein, 16 aa, synthetic construct
YQVGHDSPHKSGQNQQ

SEQ ID NO: 2783 - protein, 16 aa, synthetic construct
TIKGDDSPHKSVQNQQ

SEQ ID NO: 2784 - protein, 16 aa, synthetic construct
TINGHDSPHKSVQSHQ

SEQ ID NO: 2785 - protein, 16 aa, synthetic construct
TINGHDSPHKSGQFVV

SEQ ID NO: 2786 - protein, 16 aa, synthetic construct
TVNGHDSPHKSRQNLQ

SEQ ID NO: 2787 - protein, 16 aa, synthetic construct
ATNGHNSPHKSGQNQE

SEQ ID NO: 2788 - protein, 16 aa, synthetic construct
AINGHDSPHKSAQNQQ

SEQ ID NO: 2789 - protein, 16 aa, synthetic construct
TEHGHDSPHKSGQNQQ

SEQ ID NO: 2790 - protein, 16 aa, synthetic construct
TIYGHDSPHKSGQSQP

SEQ ID NO: 2791 - protein, 16 aa, synthetic construct
TISGHESPHKSGQNEQ

SEQ ID NO: 2792 - protein, 16 aa, synthetic construct
AIIGHDSPHKSAQNQQ

SEQ ID NO: 2793 - protein, 16 aa, synthetic construct
AIDGHDSPHKSGQNQL

SEQ ID NO: 2794 - protein, 16 aa, synthetic construct
TIMGHDSPHKSVQNQQ

SEQ ID NO: 2795 - protein, 16 aa, synthetic construct
EVGGHDSPHKSGQNQQ

SEQ ID NO: 2796 - protein, 16 aa, synthetic construct
TINGHDSPHKSAQNLL

SEQ ID NO: 2797 - protein, 16 aa, synthetic construct
TINASGSPHSKAINQQ

SEQ ID NO: 2798 - protein, 16 aa, synthetic construct
AINGNGSPHKRGQNQQ

SEQ ID NO: 2799 - protein, 16 aa, synthetic construct
SEMGHDSPHKSGQNQQ

SEQ ID NO: 2800 - protein, 16 aa, synthetic construct
AQQGHDSPHKSGQNQQ

SEQ ID NO: 2801 - protein, 16 aa, synthetic construct
AINGHDSPHKSGQSLQ

SEQ ID NO: 2802 - protein, 16 aa, synthetic construct
TINGSGSPHSKAPNQQ

SEQ ID NO: 2803 - protein, 16 aa, synthetic construct
CGEGHDSPHKSGQNQQ

SEQ ID NO: 2804 - protein, 16 aa, synthetic construct
TVNGHDSPHKSAQNHQ

SEQ ID NO: 2805 - protein, 16 aa, synthetic construct
TVNGHDSPHKSGQTQL

SEQ ID NO: 2806 - protein, 16 aa, synthetic construct
TNNGHDSPHKSGRNRQ

SEQ ID NO: 2807 - protein, 16 aa, synthetic construct
TINGHDSPHKYGQNEQ

SEQ ID NO: 2808 - protein, 16 aa, synthetic construct
TINGNGSPHSKAPNLQ

SEQ ID NO: 2809 - protein, 16 aa, synthetic construct
SINGHDSPHKSQQNQQ

SEQ ID NO: 2810 - protein, 16 aa, synthetic construct
TIGGHDSPHKSGQNQQ

SEQ ID NO: 2811 - protein, 16 aa, synthetic construct
TINGHDSPHKSVQSKQ

SEQ ID NO: 2812 - protein, 16 aa, synthetic construct
ELVGHDSPHKSGQNQQ

SEQ ID NO: 2813 - protein, 16 aa, synthetic construct
ELMGHDSPHKSGQNQQ

SEQ ID NO: 2814 - protein, 16 aa, synthetic construct
TINGNDSPHKIGHNQQ

SEQ ID NO: 2815 - protein, 16 aa, synthetic construct
TIKGGGSPHSKAQDQQ

SEQ ID NO: 2816 - protein, 16 aa, synthetic construct
TVNGHDSPHKSGQTQQ

SEQ ID NO: 2817 - protein, 16 aa, synthetic construct
TINGQDSPHKSGQNPL

SEQ ID NO: 2818 - protein, 16 aa, synthetic construct
TVNASGSPHSKAQNHQ

SEQ ID NO: 2819 - protein, 16 aa, synthetic construct
TINGHDSPHKSGRDQK

SEQ ID NO: 2820 - protein, 16 aa, synthetic construct
TINGHDSPHKSVHNQQ

SEQ ID NO: 2821 - protein, 16 aa, synthetic construct
TINGHDSPHKSGQWKR

SEQ ID NO: 2822 - protein, 16 aa, synthetic construct
TIDGSGSPHSKAENRQ

SEQ ID NO: 2823 - protein, 16 aa, synthetic construct
NEIGHDSPHKSGQNQQ

SEQ ID NO: 2824 - protein, 16 aa, synthetic construct
AINGHDSPHKSGQSQQ

SEQ ID NO: 2825 - protein, 16 aa, synthetic construct
IINGHDSPHKSRQAQQ

SEQ ID NO: 2826 - protein, 16 aa, synthetic construct
TPNGHDSPHKSGQNQQ

SEQ ID NO: 2827 - protein, 16 aa, synthetic construct
ITNGHDSPHKSGQTQQ

SEQ ID NO: 2828 - protein, 16 aa, synthetic construct
TINGHDSPHKSVQNHQ

SEQ ID NO: 2829 - protein, 16 aa, synthetic construct
TINGHDSPHKSKQNQQ

SEQ ID NO: 2830 - protein, 16 aa, synthetic construct
TINGHDSPHKSAQNQL

SEQ ID NO: 2831 - protein, 16 aa, synthetic construct
TVNGHDSPHKSGQTQP

SEQ ID NO: 2832 - protein, 16 aa, synthetic construct
TDQGHDSPHKSGQNQQ

SEQ ID NO: 2833 - protein, 16 aa, synthetic construct
TINGHDSPHKLWINQQ

SEQ ID NO: 2834 - protein, 16 aa, synthetic construct
GINGPDSPHKSGQNQQ

SEQ ID NO: 2835 - protein, 16 aa, synthetic construct
SEIGHDSPHKSGQNQQ

SEQ ID NO: 2836 - protein, 16 aa, synthetic construct
TINGHDSPHKSVQKQL

SEQ ID NO: 2837 - protein, 16 aa, synthetic construct
TINGHPSPHWKGQNQQ

SEQ ID NO: 2838 - protein, 16 aa, synthetic construct
TVNGHDSPHKSGRNQL

SEQ ID NO: 2839 - protein, 16 aa, synthetic construct
TIKGSGSPHSKVQDQQ

SEQ ID NO: 2840 - protein, 16 aa, synthetic construct
SEKGHDSPHKSGQNQQ

SEQ ID NO: 2841 - protein, 16 aa, synthetic construct
WSAGHDSPHKSGQNQQ

SEQ ID NO: 2842 - protein, 16 aa, synthetic construct
ELAGHDSPHKSGQNQQ

SEQ ID NO: 2843 - protein, 16 aa, synthetic construct
TINGHDSPHKMGRNQQ

SEQ ID NO: 2844 - protein, 16 aa, synthetic construct
TINGHDSPHKSGISIQ

SEQ ID NO: 2845 - protein, 16 aa, synthetic construct
TSNGHDSPHKSVQNLQ

SEQ ID NO: 2846 - protein, 16 aa, synthetic construct
QTQGHDSPHKSGQNQQ

SEQ ID NO: 2847 - protein, 16 aa, synthetic construct
TINGHDSPHKMAHNQQ

SEQ ID NO: 2848 - protein, 16 aa, synthetic construct
AINGSGSPHSKAQTQQ

SEQ ID NO: 2849 - protein, 16 aa, synthetic construct
TINGHDSPHKHGQNQQ

SEQ ID NO: 2850 - protein, 16 aa, synthetic construct
GADGHDSPHKSGQNQQ

SEQ ID NO: 2851 - protein, 16 aa, synthetic construct
VGEGHDSPHKSGQNQQ

SEQ ID NO: 2852 - protein, 16 aa, synthetic construct
ANEGHDSPHKSGQNQQ

SEQ ID NO: 2853 - protein, 16 aa, synthetic construct
TEAKSGSPHSKAQNQQ

SEQ ID NO: 2854 - protein, 16 aa, synthetic construct
TINGHDSPHKSVQSQQ

SEQ ID NO: 2855 - protein, 16 aa, synthetic construct
TIPGSGSPHSKAQNLQ

SEQ ID NO: 2856 - protein, 16 aa, synthetic construct
TINGHDSPHKSGQTVC

SEQ ID NO: 2857 - protein, 16 aa, synthetic construct
ELRGHDSPHKSGQNQQ

SEQ ID NO: 2858 - protein, 16 aa, synthetic construct
CQIGHDSPHKSGQNQQ

SEQ ID NO: 2859 - protein, 16 aa, synthetic construct
GVMGHDSPHKSGQNQQ

SEQ ID NO: 2860 - protein, 16 aa, synthetic construct
ACDGHDSPHKSGQNQQ

SEQ ID NO: 2861 - protein, 16 aa, synthetic construct
TINGQDSPHKSGQYQQ

SEQ ID NO: 2862 - protein, 16 aa, synthetic construct
TINGHDSPHKSGQQIM

SEQ ID NO: 2863 - protein, 16 aa, synthetic construct
TINGHDSPHKSRQNEQ

SEQ ID NO: 2864 - protein, 16 aa, synthetic construct
ASNGHDSPHKSGLNHQ

SEQ ID NO: 2865 - protein, 16 aa, synthetic construct
TVNGHDSPHKSGQSQP

SEQ ID NO: 2866 - protein, 16 aa, synthetic construct
NELGHDSPHKSGQNQQ

SEQ ID NO: 2867 - protein, 16 aa, synthetic construct
AAEGHDSPHKSGQNQQ

SEQ ID NO: 2868 - protein, 16 aa, synthetic construct
GQNGHDSPHKSGQNQQ

SEQ ID NO: 2869 - protein, 16 aa, synthetic construct
NEFGHDSPHKSGQNQQ

SEQ ID NO: 2870 - protein, 16 aa, synthetic construct
TSIGYDSPHKSGQNQQ

SEQ ID NO: 2871 - protein, 16 aa, synthetic construct
TDNGHDSPHKSGQNLQ

SEQ ID NO: 2872 - protein, 16 aa, synthetic construct
TITGHDSPHKSRQDQQ

SEQ ID NO: 2873 - protein, 16 aa, synthetic construct
AEHGHDSPHKSGQNQQ

SEQ ID NO: 2874 - protein, 16 aa, synthetic construct
TINGDDSPHKSGQKQL

SEQ ID NO: 2875 - protein, 16 aa, synthetic construct
EILGHDSPHKSGQNQQ

SEQ ID NO: 2876 - protein, 16 aa, synthetic construct
TIHGSGSPHSKAQNQA

SEQ ID NO: 2877 - protein, 16 aa, synthetic construct
AINGDDSPHKSGHNQQ

SEQ ID NO: 2878 - protein, 16 aa, synthetic construct
TSNGHNSPHKSGQNQE

SEQ ID NO: 2879 - protein, 16 aa, synthetic construct
TINGHDSPHKSGQMIH

SEQ ID NO: 2880 - protein, 16 aa, synthetic construct
NAIGHDSPHKSGQNQQ

SEQ ID NO: 2881 - protein, 16 aa, synthetic construct
VINGHDSPHKSGRNHQ

SEQ ID NO: 2882 - protein, 16 aa, synthetic construct
TITGHDSPHKSVQNRQ

SEQ ID NO: 2883 - protein, 16 aa, synthetic construct
TINGHDSPHKSGQKMN

SEQ ID NO: 2884 - protein, 16 aa, synthetic construct
TIHGHDSPHKSGQSQQ

SEQ ID NO: 2885 - protein, 16 aa, synthetic construct
TEIGHDSPHKSGQNQQ

SEQ ID NO: 2886 - protein, 16 aa, synthetic construct
TINGHDSPHKSGQYQH

SEQ ID NO: 2887 - protein, 14 aa, synthetic construct
GSGSPHSKAQNRHT

SEQ ID NO: 2888 - protein, 14 aa, synthetic construct
GSGSPHSKVQNQQT

SEQ ID NO: 2889 - protein, 14 aa, synthetic construct
MSGSPHSKAQNQQT

SEQ ID NO: 2890 - protein, 14 aa, synthetic construct
GSGSPHSKARDQQT

SEQ ID NO: 2891 - protein, 14 aa, synthetic construct
GSGSPHSKAPNLQT

SEQ ID NO: 2892 - protein, 14 aa, synthetic construct
TSGSPHSKAQNQQT

SEQ ID NO: 2893 - protein, 14 aa, synthetic construct
GSGSPHSKAHVRQT

SEQ ID NO: 2894 - protein, 14 aa, synthetic construct
GSGSPHSKAPNQHT

SEQ ID NO: 2895 - protein, 14 aa, synthetic construct
ISGSPHSKAQNQQT

SEQ ID NO: 2896 - protein, 14 aa, synthetic construct
GSGSPHSKTQSQQT

SEQ ID NO: 2897 - protein, 4 aa, synthetic construct
QRMS

SEQ ID NO: 2898 - protein, 14 aa, synthetic construct
ESGSPHSKAQNQQI

SEQ ID NO: 2899 - protein, 14 aa, synthetic construct
GSGSPHSKAQPAKT

SEQ ID NO: 2900 - protein, 14 aa, synthetic construct
SSGSPHSKAQNQQT

SEQ ID NO: 2901 - protein, 14 aa, synthetic construct
GSGSPHSKSQTQQN

SEQ ID NO: 2902 - protein, 14 aa, synthetic construct
ASGSPHSKAQNQQT

SEQ ID NO: 2903 - protein, 14 aa, synthetic construct
GSGSPHSKAQNLAT

SEQ ID NO: 2904 - protein, 14 aa, synthetic construct
GSGSPHSKSQNQLT

SEQ ID NO: 2905 - protein, 14 aa, synthetic construct
NSGSPHSKAQNQQT

SEQ ID NO: 2906 - protein, 14 aa, synthetic construct
GSGSPHSKAQGQQT

SEQ ID NO: 2907 - protein, 4 aa, synthetic construct
QGIL

SEQ ID NO: 2908 - protein, 14 aa, synthetic construct
GSGSPHSKALNRQS

SEQ ID NO: 2909 - protein, 14 aa, synthetic construct
LSGSPHSKAQNQQT

SEQ ID NO: 2910 - protein, 14 aa, synthetic construct
GSGSPHSKAHNQQT

SEQ ID NO: 2911 - protein, 14 aa, synthetic construct
GSGSPHSKTQNQQT

SEQ ID NO: 2912 - protein, 14 aa, synthetic construct
GSGSPHSKAQNPPT

SEQ ID NO: 2913 - protein, 14 aa, synthetic construct
GSGSPHSKAQNLQT

SEQ ID NO: 2914 - protein, 14 aa, synthetic construct
GSGSPHSKAQYQQT

SEQ ID NO: 2915 - protein, 14 aa, synthetic construct
GSGSPHSKAQDQET

SEQ ID NO: 2916 - protein, 14 aa, synthetic construct
KSGSPHSKAQNQQT

SEQ ID NO: 2917 - protein, 4 aa, synthetic construct
QDRQ

SEQ ID NO: 2918 - protein, 14 aa, synthetic construct
GSGSPHSKAQDQQT

SEQ ID NO: 2919 - protein, 14 aa, synthetic construct
GSGSPHSKGHWQQT

SEQ ID NO: 2920 - protein, 14 aa, synthetic construct
GSGSPHSKAPNQQT

SEQ ID NO: 2921 - protein, 14 aa, synthetic construct
GSGSPHSKAQNQLI

SEQ ID NO: 2922 - protein, 14 aa, synthetic construct
GSGSPHSKRPEQQT

SEQ ID NO: 2923 - protein, 14 aa, synthetic construct
GSGSPHSKAQRTMT

SEQ ID NO: 2924 - protein, 14 aa, synthetic construct
GSGSPHSKAQNQQH

SEQ ID NO: 2925 - protein, 14 aa, synthetic construct
HSGSPHSKAQNQQT

SEQ ID NO: 2926 - protein, 14 aa, synthetic construct
GSGSPHSKALHQHT

SEQ ID NO: 2927 - protein, 14 aa, synthetic construct
GSGSPHSKAQHRIT

SEQ ID NO: 2928 - protein, 14 aa, synthetic construct
GSGSPHSKAQYIHT

SEQ ID NO: 2929 - protein, 14 aa, synthetic construct
GSGSPHSKAQKFET

SEQ ID NO: 2930 - protein, 14 aa, synthetic construct
ESGSPHSKAQNHQT

SEQ ID NO: 2931 - protein, 14 aa, synthetic construct
GSGSPHSKAQFPST

SEQ ID NO: 2932 - protein, 14 aa, synthetic construct
PSGSPHSKAQNQQT

SEQ ID NO: 2933 - protein, 14 aa, synthetic construct
GSGSPHSKAHNQQR

SEQ ID NO: 2934 - protein, 14 aa, synthetic construct
GSGSPHSKAQAIKT

SEQ ID NO: 2935 - protein, 14 aa, synthetic construct
GSGSPHSKGQNRQT

SEQ ID NO: 2936 - protein, 14 aa, synthetic construct
GSGSPHSKAQSQQT

SEQ ID NO: 2937 - protein, 14 aa, synthetic construct
ASGSPHSKAQNQLT

SEQ ID NO: 2938 - protein, 14 aa, synthetic construct
RSGSPHSKAQNQQT

SEQ ID NO: 2939 - protein, 14 aa, synthetic construct
GSGSPHSKAQYQHT

SEQ ID NO: 2940 - protein, 14 aa, synthetic construct
GSGSPHTKAQNPQS

SEQ ID NO: 2941 - protein, 14 aa, synthetic construct
GSGSPHSKGQNPPT

SEQ ID NO: 2942 - protein, 14 aa, synthetic construct
GSGSPHSKAQHQLT

SEQ ID NO: 2943 - protein, 14 aa, synthetic construct
GSGSPHSKAQSPPT

SEQ ID NO: 2944 - protein, 14 aa, synthetic construct
GSGSPHSKAQAKLT

SEQ ID NO: 2945 - protein, 14 aa, synthetic construct
GSGSPHSKTKSQQT

SEQ ID NO: 2946 - protein, 14 aa, synthetic construct
GSGSPHSKAQDRPT

SEQ ID NO: 2947 - protein, 14 aa, synthetic construct
GSGSPHSKAQSQQL

SEQ ID NO: 2948 - protein, 14 aa, synthetic construct
GSGSPHSKAQAFHT

SEQ ID NO: 2949 - protein, 14 aa, synthetic construct
GSGSPHSKAQKQQD

SEQ ID NO: 2950 - protein, 14 aa, synthetic construct
GSGSPHSKAQNAQT

SEQ ID NO: 2951 - protein, 14 aa, synthetic construct
WSGSPHSKAQNQQT

SEQ ID NO: 2952 - protein, 14 aa, synthetic construct
GSGSPHSKAHNQLT

SEQ ID NO: 2953 - protein, 14 aa, synthetic construct
GSGSPHSKAQNQQY

SEQ ID NO: 2954 - protein, 14 aa, synthetic construct
GSGSPHSKAQKLNT

SEQ ID NO: 2955 - protein, 14 aa, synthetic construct
GSGSPHSKSQNVQT

SEQ ID NO: 2956 - protein, 14 aa, synthetic construct
GSGSPHSKAQAQQT

SEQ ID NO: 2957 - protein, 14 aa, synthetic construct
GSGSPHSKAQNLQA

SEQ ID NO: 2958 - protein, 14 aa, synthetic construct
DSGSPHSKAQNQQT

SEQ ID NO: 2959 - protein, 14 aa, synthetic construct
ASGSPHSKAPNQQT

SEQ ID NO: 2960 - protein, 14 aa, synthetic construct
GSGSPHSKAQTPPT

SEQ ID NO: 2961 - protein, 14 aa, synthetic construct
GSGSPHSKAQYQHA

SEQ ID NO: 2962 - protein, 14 aa, synthetic construct
GSGSPHSKAQGQQA

SEQ ID NO: 2963 - protein, 14 aa, synthetic construct
GSGSPHNKAQNHQT

SEQ ID NO: 2964 - protein, 14 aa, synthetic construct
GSGSPHSKAQPPAT

SEQ ID NO: 2965 - protein, 14 aa, synthetic construct
GSGSPHSKAQERPT

SEQ ID NO: 2966 - protein, 14 aa, synthetic construct
GSGSPHSKAQDLQT

SEQ ID NO: 2967 - protein, 14 aa, synthetic construct
GSGSPHSKAQAMHT

SEQ ID NO: 2968 - protein, 14 aa, synthetic construct
GSGSPHSKALNQQT

SEQ ID NO: 2969 - protein, 14 aa, synthetic construct
GSGSPHSKAQHPST

SEQ ID NO: 2970 - protein, 14 aa, synthetic construct
GSGSPHSKAPGLQT

SEQ ID NO: 2971 - protein, 14 aa, synthetic construct
GSGSPHSKAQGIRT

SEQ ID NO: 2972 - protein, 14 aa, synthetic construct
GSGSPHSKAQAPAT

SEQ ID NO: 2973 - protein, 14 aa, synthetic construct
GSGSPHSKSQSQQI

SEQ ID NO: 2974 - protein, 14 aa, synthetic construct
GSGSPHSKAQIPPT

SEQ ID NO: 2975 - protein, 14 aa, synthetic construct
GSGSPHSKAQTQLT

SEQ ID NO: 2976 - protein, 14 aa, synthetic construct
GSGSPHSKAQAPST

SEQ ID NO: 2977 - protein, 14 aa, synthetic construct
GSGSPHSKGQNQQT

SEQ ID NO: 2978 - protein, 14 aa, synthetic construct
ASGSPHSKAHNQQT

SEQ ID NO: 2979 - protein, 14 aa, synthetic construct
GSGSPHSKAQNTYA

SEQ ID NO: 2980 - protein, 14 aa, synthetic construct
GSGSPHSKSQNQHI

SEQ ID NO: 2981 - protein, 14 aa, synthetic construct
GSGSPHSKAQNHLT

SEQ ID NO: 2982 - protein, 14 aa, synthetic construct
GSGSPHSKAQIGMT

SEQ ID NO: 2983 - protein, 14 aa, synthetic construct
GSGSPHSKALNKQT

SEQ ID NO: 2984 - protein, 14 aa, synthetic construct
GSGSPHSKAQLQQT

SEQ ID NO: 2985 - protein, 14 aa, synthetic construct
GSGSPHSKAQRMST

SEQ ID NO: 2986 - protein, 14 aa, synthetic construct
GSGSPHSKAQGILT

SEQ ID NO: 2987 - protein, 14 aa, synthetic construct
GSGSPHSKAQDRQT

SEQ ID NO: 2988 - protein, 14 aa, synthetic construct
GSGSPHSKARDWQT

SEQ ID NO: 2989 - protein, 14 aa, synthetic construct
GSGSPHSKAQNTHD

SEQ ID NO: 2990 - protein, 14 aa, synthetic construct
GSGSPHSKAPNLQI

SEQ ID NO: 2991 - protein, 14 aa, synthetic construct
GSGSPHSKAQERST

SEQ ID NO: 2992 - protein, 14 aa, synthetic construct
GSGSPHSKAQNYQT

SEQ ID NO: 2993 - protein, 14 aa, synthetic construct
GSGSPHSKAQRTCT

SEQ ID NO: 2994 - protein, 14 aa, synthetic construct
GSGSPHSKAQIGHT

SEQ ID NO: 2995 - protein, 14 aa, synthetic construct
GSGSPHSKAQGAIT

SEQ ID NO: 2996 - protein, 14 aa, synthetic construct
GSGSPHSKAQVPPT

SEQ ID NO: 2997 - protein, 14 aa, synthetic construct
GSGSPHSKAQVQQI

SEQ ID NO: 2998 - protein, 14 aa, synthetic construct
GSGSPHSKALMRQT

SEQ ID NO: 2999 - protein, 14 aa, synthetic construct
GSGSPHSKAQYSVT

SEQ ID NO: 3000 - protein, 14 aa, synthetic construct
GSGSPHSKVPNLQT

SEQ ID NO: 3001 - protein, 14 aa, synthetic construct
GSGSPHSKAQSQQI

SEQ ID NO: 3002 - protein, 14 aa, synthetic construct
GSGSPHSKAQAITT

SEQ ID NO: 3003 - protein, 14 aa, synthetic construct
GSGSPHSKAQKTLT

SEQ ID NO: 3004 - protein, 14 aa, synthetic construct
GSGSPHSKAQNQWT

SEQ ID NO: 3005 - protein, 14 aa, synthetic construct
GSGSPHSKAQLHHT

SEQ ID NO: 3006 - protein, 14 aa, synthetic construct
GSGSPHSKAQNIII

SEQ ID NO: 3007 - protein, 14 aa, synthetic construct
GSGSPHSKAQGHHT

SEQ ID NO: 3008 - protein, 14 aa, synthetic construct
GSGSPHSKAQSKVT

SEQ ID NO: 3009 - protein, 14 aa, synthetic construct
GSGSPHSKAQLPST

SEQ ID NO: 3010 - protein, 14 aa, synthetic construct
GSGSPHSKAIGKQT

SEQ ID NO: 3011 - protein, 14 aa, synthetic construct
GSGSPHSKAQAIHT

SEQ ID NO: 3012 - protein, 14 aa, synthetic construct
GSGSPHSKAQHGLT

SEQ ID NO: 3013 - protein, 14 aa, synthetic construct
GSGSPHSKAQFMCT

SEQ ID NO: 3014 - protein, 14 aa, synthetic construct
VSGSPHSKAQGQQT

SEQ ID NO: 3015 - protein, 14 aa, synthetic construct
GSGSPHSKAQHLQT

SEQ ID NO: 3016 - protein, 14 aa, synthetic construct
GSGSPHSKTQNHQN

SEQ ID NO: 3017 - protein, 14 aa, synthetic construct
GSGSPHSKAQPART

SEQ ID NO: 3018 - protein, 14 aa, synthetic construct
GSGSPHSKAQSLQT

SEQ ID NO: 3019 - protein, 14 aa, synthetic construct
GSGSPHSKSQSQLT

SEQ ID NO: 3020 - protein, 14 aa, synthetic construct
GSGSPHSKAQDRQS

SEQ ID NO: 3021 - protein, 14 aa, synthetic construct
GSGSPHSKAQMPST

SEQ ID NO: 3022 - protein, 14 aa, synthetic construct
GSGSPHSKAQGSLT

SEQ ID NO: 3023 - protein, 14 aa, synthetic construct
GSGSPHSKSQNQQT

SEQ ID NO: 3024 - protein, 14 aa, synthetic construct
GSGSPHSKAQVPAT

SEQ ID NO: 3025 - protein, 14 aa, synthetic construct
GSGSPHSKAQDKQT

SEQ ID NO: 3026 - protein, 14 aa, synthetic construct
GSGSPHSKAHYQQT

SEQ ID NO: 3027 - protein, 14 aa, synthetic construct
GSGSPHSKAQVPST

SEQ ID NO: 3028 - protein, 14 aa, synthetic construct
GSGSPHSKARGEQT

SEQ ID NO: 3029 - protein, 14 aa, synthetic construct
GSGSPHSKAPGQQT

SEQ ID NO: 3030 - protein, 14 aa, synthetic construct
GSGSPHSKAQSLQI

SEQ ID NO: 3031 - protein, 14 aa, synthetic construct
GSGSPHSKRLEQQT

SEQ ID NO: 3032 - protein, 14 aa, synthetic construct
GSGSPHSKAQNQST

SEQ ID NO: 3033 - protein, 14 aa, synthetic construct
GSGSPHSKAQKVIT

SEQ ID NO: 3034 - protein, 14 aa, synthetic construct
GSGSPHSKAQNNDQ

SEQ ID NO: 3035 - protein, 14 aa, synthetic construct
GSGSPHSKAQSVHT

SEQ ID NO: 3036 - protein, 14 aa, synthetic construct
GSGSPHSKAQPLGT

SEQ ID NO: 3037 - protein, 14 aa, synthetic construct
GSGSPHSKAHNQET

SEQ ID NO: 3038 - protein, 14 aa, synthetic construct
GSGSPHSKAQNLQI

SEQ ID NO: 3039 - protein, 14 aa, synthetic construct
GSGSPHSKAQIQQT

SEQ ID NO: 3040 - protein, 14 aa, synthetic construct
GSGSPHSKAQVRNT

SEQ ID NO: 3041 - protein, 14 aa, synthetic construct
GSGSPHSKAPSNQT

SEQ ID NO: 3042 - protein, 14 aa, synthetic construct
GSGSPHSKAQVGHT

SEQ ID NO: 3043 - protein, 14 aa, synthetic construct
GSGSPHSKAQRDIT

SEQ ID NO: 3044 - protein, 14 aa, synthetic construct
GSGSPHSKAQMPNT

SEQ ID NO: 3045 - protein, 14 aa, synthetic construct
GSGSPHSKARGLQT

SEQ ID NO: 3046 - protein, 14 aa, synthetic construct
GSGSPHSKLQKQQT

SEQ ID NO: 3047 - protein, 14 aa, synthetic construct
GSGSPHSKAPSLQT

SEQ ID NO: 3048 - protein, 14 aa, synthetic construct
GSGSPHSKAQRDQT

SEQ ID NO: 3049 - protein, 14 aa, synthetic construct
GSGSPHSKNRDQQT

SEQ ID NO: 3050 - protein, 14 aa, synthetic construct
GSGSPHSKAQAKGT

SEQ ID NO: 3051 - protein, 14 aa, synthetic construct
GSGSPHSKAQSAHT

SEQ ID NO: 3052 - protein, 14 aa, synthetic construct
GSGSPHSKSQNHQT

SEQ ID NO: 3053 - protein, 14 aa, synthetic construct
RSGSPHSKAQDQQT

SEQ ID NO: 3054 - protein, 14 aa, synthetic construct
GSGSPHSKAQSTMT

SEQ ID NO: 3055 - protein, 14 aa, synthetic construct
GSGSPHSKAQREMT

SEQ ID NO: 3056 - protein, 14 aa, synthetic construct
GSGSPHSKAQYRAT

SEQ ID NO: 3057 - protein, 14 aa, synthetic construct
GSGSPHSKNQWQQT

SEQ ID NO: 3058 - protein, 14 aa, synthetic construct
GSGSPHSKAQRMNT

SEQ ID NO: 3059 - protein, 14 aa, synthetic construct
GSGSPHAKAQNHQT

SEQ ID NO: 3060 - protein, 14 aa, synthetic construct
GSGSPHSKAGDSQT

SEQ ID NO: 3061 - protein, 14 aa, synthetic construct
GSGSPHSKLKSQQT

SEQ ID NO: 3062 - protein, 14 aa, synthetic construct
GSGSPHSKAQKIST

SEQ ID NO: 3063 - protein, 14 aa, synthetic construct
GSGSPHSKAPSMQT

SEQ ID NO: 3064 - protein, 14 aa, synthetic construct
GSGSPHSKASPRQT

SEQ ID NO: 3065 - protein, 14 aa, synthetic construct
GSGSPHSKRMEQQT

SEQ ID NO: 3066 - protein, 14 aa, synthetic construct
GSGSPHSKAQYQNT

SEQ ID NO: 3067 - protein, 14 aa, synthetic construct
RSGSPHSKAQNQQI

SEQ ID NO: 3068 - protein, 14 aa, synthetic construct
GSGSPHTKAQNPPT

SEQ ID NO: 3069 - protein, 14 aa, synthetic construct
GSGSPHTKAQNQQT

SEQ ID NO: 3070 - protein, 14 aa, synthetic construct
ASGSPHSKAQHQQT

SEQ ID NO: 3071 - protein, 14 aa, synthetic construct
ASGSPHSKAINQQT

SEQ ID NO: 3072 - protein, 14 aa, synthetic construct
GSGSPHSKAPNQQH

SEQ ID NO: 3073 - protein, 14 aa, synthetic construct
ASGSPHSKAQNHQT

SEQ ID NO: 3074 - protein, 14 aa, synthetic construct
GSGSPHSKAENRQT

SEQ ID NO: 3075 - protein, 14 aa, synthetic construct
GSGSPHSKVQDQQT

SEQ ID NO: 3076 - protein, 14 aa, synthetic construct
GSGSPHSKAQTQQA

SEQ ID NO: 3077 - protein, 14 aa, synthetic construct
GSGSPHSKAQNQAT

SEQ ID NO: 3078 - protein, 14 aa, synthetic construct
GHDSPHKSGQIRQT

SEQ ID NO: 3079 - protein, 14 aa, synthetic construct
GHDSPHKIGQNQHA

SEQ ID NO: 3080 - protein, 14 aa, synthetic construct
GYDSPHKSGQKQQT

SEQ ID NO: 3081 - protein, 4 aa, synthetic construct
RDWQ

SEQ ID NO: 3082 - protein, 14 aa, synthetic construct
GHDSPHKSGQSVQT

SEQ ID NO: 3083 - protein, 14 aa, synthetic construct
GHESPHKSGRSQQT

SEQ ID NO: 3084 - protein, 14 aa, synthetic construct
GHDSPHKSGQNKLE

SEQ ID NO: 3085 - protein, 14 aa, synthetic construct
GHDSPHKTGQNQQK

SEQ ID NO: 3086 - protein, 14 aa, synthetic construct
GRGSPHKRGQNQQT

SEQ ID NO: 3087 - protein, 14 aa, synthetic construct
GHDNPHKSGQNQQT

SEQ ID NO: 3088 - protein, 14 aa, synthetic construct
GQDSPHKSGQHQQA

SEQ ID NO: 3089 - protein, 14 aa, synthetic construct
GHDSPHKSGQIQHT

SEQ ID NO: 3090 - protein, 14 aa, synthetic construct
GHDSPHKSGPRQQT

SEQ ID NO: 3091 - protein, 14 aa, synthetic construct
GHDSPHKSGHTQQT

SEQ ID NO: 3092 - protein, 14 aa, synthetic construct
GHDSPHKSGQRQHT

SEQ ID NO: 3093 - protein, 14 aa, synthetic construct
GHDSPHKSAQSQQT

SEQ ID NO: 3094 - protein, 14 aa, synthetic construct
GHESPHKSGQNQQS

SEQ ID NO: 3095 - protein, 14 aa, synthetic construct
GHDSPHKSLQNQQT

SEQ ID NO: 3096 - protein, 14 aa, synthetic construct
GHDSPHKSGRNQET

SEQ ID NO: 3097 - protein, 14 aa, synthetic construct
GHDSPHKSGQTQLT

SEQ ID NO: 3098 - protein, 14 aa, synthetic construct
GHDSPHKSEKNQQT

SEQ ID NO: 3099 - protein, 14 aa, synthetic construct
GRDSPHKSGQDQQT

SEQ ID NO: 3100 - protein, 14 aa, synthetic construct
GHDSPHKTGHNQQT

SEQ ID NO: 3101 - protein, 14 aa, synthetic construct
AHDSPHKSGQNQLT

SEQ ID NO: 3102 - protein, 14 aa, synthetic construct
GYDSPHKSGQTQQT

SEQ ID NO: 3103 - protein, 14 aa, synthetic construct
GHESPHKSGQTQQI

SEQ ID NO: 3104 - protein, 14 aa, synthetic construct
GHDSPHKSGQSKQA

SEQ ID NO: 3105 - protein, 14 aa, synthetic construct
GHESPHKSGQNQQT

SEQ ID NO: 3106 - protein, 14 aa, synthetic construct
GHDSPHKTGQNQPP

SEQ ID NO: 3107 - protein, 14 aa, synthetic construct
GHDSPHKSGQSPQT

SEQ ID NO: 3108 - protein, 14 aa, synthetic construct
GNDSPHKSVQNQQT

SEQ ID NO: 3109 - protein, 14 aa, synthetic construct
GHDSPHKSAQNYQT

SEQ ID NO: 3110 - protein, 14 aa, synthetic construct
AHDSPHKIGQNHQT

SEQ ID NO: 3111 - protein, 14 aa, synthetic construct
GHESPHKSAQNRQT

SEQ ID NO: 3112 - protein, 14 aa, synthetic construct
GHDSPHKSGQNQQG

SEQ ID NO: 3113 - protein, 14 aa, synthetic construct
GQDSPHKIGQNQQT

SEQ ID NO: 3114 - protein, 14 aa, synthetic construct
GHDSPHKSGQNHLT

SEQ ID NO: 3115 - protein, 14 aa, synthetic construct
GHDSPHKSGQYQHT

SEQ ID NO: 3116 - protein, 14 aa, synthetic construct
GNDSPHKSVQNHQT

SEQ ID NO: 3117 - protein, 14 aa, synthetic construct
GHDSPHKSGQNQWT

SEQ ID NO: 3118 - protein, 14 aa, synthetic construct
GHDSPHKSVQNQHT

SEQ ID NO: 3119 - protein, 14 aa, synthetic construct
GHDSPHKSGQNQHA

SEQ ID NO: 3120 - protein, 14 aa, synthetic construct
GHDSPHKSGQTRQT

SEQ ID NO: 3121 - protein, 14 aa, synthetic construct
GHDSPHKSGQNLHT

SEQ ID NO: 3122 - protein, 14 aa, synthetic construct
GHDSPHKSGLNQQT

SEQ ID NO: 3123 - protein, 14 aa, synthetic construct
GHDSPHKSAQNQET

SEQ ID NO: 3124 - protein, 14 aa, synthetic construct
GHDSPHKSGQHLQT

SEQ ID NO: 3125 - protein, 14 aa, synthetic construct
GHDSPHKSRLNQPT

SEQ ID NO: 3126 - protein, 14 aa, synthetic construct
GHDSPHKSGQKQQT

SEQ ID NO: 3127 - protein, 14 aa, synthetic construct
GQDSPHKSGQNQDT

SEQ ID NO: 3128 - protein, 14 aa, synthetic construct
GHDSPHKSGRNQQT

SEQ ID NO: 3129 - protein, 14 aa, synthetic construct
GHDSPHKSGQNLLT

SEQ ID NO: 3130 - protein, 14 aa, synthetic construct
GHDSPHKSGQLVIT

SEQ ID NO: 3131 - protein, 14 aa, synthetic construct
GHDSPHKSRQSQQT

SEQ ID NO: 3132 - protein, 14 aa, synthetic construct
GHDSPHKSGRTQET

SEQ ID NO: 3133 - protein, 14 aa, synthetic construct
GHDSPHKSVQTHQT

SEQ ID NO: 3134 - protein, 14 aa, synthetic construct
GHDSPHKSGQNQPA

SEQ ID NO: 3135 - protein, 14 aa, synthetic construct
KHDSPHKSGQNQQT

SEQ ID NO: 3136 - protein, 14 aa, synthetic construct
GHDSPHKSGQTQQT

SEQ ID NO: 3137 - protein, 14 aa, synthetic construct
GPDSPHKIGQNQQS

SEQ ID NO: 3138 - protein, 14 aa, synthetic construct
GHDSPHKSVQNQQT

SEQ ID NO: 3139 - protein, 14 aa, synthetic construct
GHDSPHKSRQDQHT

SEQ ID NO: 3140 - protein, 14 aa, synthetic construct
GPDSPHKSGQKQQT

SEQ ID NO: 3141 - protein, 14 aa, synthetic construct
GHDSPHKSRQSQHT

SEQ ID NO: 3142 - protein, 14 aa, synthetic construct
GHDSPHKSVQNQLT

SEQ ID NO: 3143 - protein, 14 aa, synthetic construct
AHDSPHKSGQNQQT

SEQ ID NO: 3144 - protein, 14 aa, synthetic construct
GQDSPHKSGQNQQS

SEQ ID NO: 3145 - protein, 14 aa, synthetic construct
GHDSPHKSGRNQQI

SEQ ID NO: 3146 - protein, 14 aa, synthetic construct
GYDSPHKSGQYQHT

SEQ ID NO: 3147 - protein, 14 aa, synthetic construct
GHDSPHKSRQNQQT

SEQ ID NO: 3148 - protein, 14 aa, synthetic construct
GHDSPHKSWVRQQT

SEQ ID NO: 3149 - protein, 14 aa, synthetic construct
GHESPHKSGQNQHS

SEQ ID NO: 3150 - protein, 14 aa, synthetic construct
GHDSPHKIGHNQQT

SEQ ID NO: 3151 - protein, 14 aa, synthetic construct
WHDSPHKSGQNQQT

SEQ ID NO: 3152 - protein, 14 aa, synthetic construct
RHDSPHKSGQNQQT

SEQ ID NO: 3153 - protein, 14 aa, synthetic construct
GHDSPHKSNAWQQT

SEQ ID NO: 3154 - protein, 14 aa, synthetic construct
GHDSPHKSGQSVPT

SEQ ID NO: 3155 - protein, 14 aa, synthetic construct
GHESPHKSGQNIQP

SEQ ID NO: 3156 - protein, 14 aa, synthetic construct
GHDSPHKSVQNHLN

SEQ ID NO: 3157 - protein, 14 aa, synthetic construct
GHDSPHKIGLDQQT

SEQ ID NO: 3158 - protein, 14 aa, synthetic construct
GHDSPHKRGPDQQS

SEQ ID NO: 3159 - protein, 14 aa, synthetic construct
GHDSPHKSGESQQT

SEQ ID NO: 3160 - protein, 14 aa, synthetic construct
GHDSPHKHGQNHQT

SEQ ID NO: 3161 - protein, 14 aa, synthetic construct
LHDSPHKSGQNQQT

SEQ ID NO: 3162 - protein, 14 aa, synthetic construct
GHDSPHKSVQNKQT

SEQ ID NO: 3163 - protein, 14 aa, synthetic construct
GQVSPHKSGQNQQT

SEQ ID NO: 3164 - protein, 14 aa, synthetic construct
GHDSPHKSGQRQLT

SEQ ID NO: 3165 - protein, 14 aa, synthetic construct
GHDSPHKIGQNQLT

SEQ ID NO: 3166 - protein, 14 aa, synthetic construct
GHDSPHKSGQIIVT

SEQ ID NO: 3167 - protein, 14 aa, synthetic construct
IHDSPHKSGQNQQT

SEQ ID NO: 3168 - protein, 14 aa, synthetic construct
GYDSPHKSGQKQST

SEQ ID NO: 3169 - protein, 14 aa, synthetic construct
MHDSPHKSGQNQQT

SEQ ID NO: 3170 - protein, 14 aa, synthetic construct
GDDSPHKSVQNQQT

SEQ ID NO: 3171 - protein, 14 aa, synthetic construct
GHDSPHKSVQSHQT

SEQ ID NO: 3172 - protein, 14 aa, synthetic construct
GHDSPHKSGQFVVT

SEQ ID NO: 3173 - protein, 14 aa, synthetic construct
GHDSPHKSRQNLQT

SEQ ID NO: 3174 - protein, 14 aa, synthetic construct
GHNSPHKSGQNQET

SEQ ID NO: 3175 - protein, 14 aa, synthetic construct
GHDSPHKSAQNQQI

SEQ ID NO: 3176 - protein, 14 aa, synthetic construct
NHDSPHKSGQNQQT

SEQ ID NO: 3177 - protein, 14 aa, synthetic construct
GHDSPHKSGQSQPT

SEQ ID NO: 3178 - protein, 14 aa, synthetic construct
GHESPHKSGQNEQT

SEQ ID NO: 3179 - protein, 14 aa, synthetic construct
GHDSPHKSAQNQQT

SEQ ID NO: 3180 - protein, 14 aa, synthetic construct
GHDSPHKSGQNQLT

SEQ ID NO: 3181 - protein, 14 aa, synthetic construct
GHDSPHKSAQNLLT

SEQ ID NO: 3182 - protein, 14 aa, synthetic construct
THDSPHKSGQNQQT

SEQ ID NO: 3183 - protein, 14 aa, synthetic construct
GNGSPHKRGQNQQT

SEQ ID NO: 3184 - protein, 14 aa, synthetic construct
GHDSPHKSGQSLQT

SEQ ID NO: 3185 - protein, 14 aa, synthetic construct
GHDSPHKSAQNHQT

SEQ ID NO: 3186 - protein, 14 aa, synthetic construct
GHDSPHKSGRNRQT

SEQ ID NO: 3187 - protein, 14 aa, synthetic construct
EHDSPHKSGQNQQT

SEQ ID NO: 3188 - protein, 14 aa, synthetic construct
GHDSPHKYGQNEQT

SEQ ID NO: 3189 - protein, 14 aa, synthetic construct
RHDSPHKSGHNQQT

SEQ ID NO: 3190 - protein, 14 aa, synthetic construct
GHDSPHKSQQNQQT

SEQ ID NO: 3191 - protein, 14 aa, synthetic construct
GHDSPHKSGQNQQI

SEQ ID NO: 3192 - protein, 14 aa, synthetic construct
QHDSPHKSGQNQQT

SEQ ID NO: 3193 - protein, 14 aa, synthetic construct
RHDSPHKIVQNQQT

SEQ ID NO: 3194 - protein, 14 aa, synthetic construct
YHDSPHKSGQNQQT

SEQ ID NO: 3195 - protein, 14 aa, synthetic construct
GHDSPHKSVQSKQT

SEQ ID NO: 3196 - protein, 14 aa, synthetic construct
GNDSPHKIGHNQQT

SEQ ID NO: 3197 - protein, 14 aa, synthetic construct
HHDSPHKSGQNQQT

SEQ ID NO: 3198 - protein, 14 aa, synthetic construct
GHDSPHKSGQTQQI

SEQ ID NO: 3199 - protein, 14 aa, synthetic construct
GQDSPHKSGQNPLT

SEQ ID NO: 3200 - protein, 14 aa, synthetic construct
GHDSPHKSGRDQKT

SEQ ID NO: 3201 - protein, 14 aa, synthetic construct
GHDSPHKSVHNQQN

SEQ ID NO: 3202 - protein, 14 aa, synthetic construct
GHDSPHKSGQWKRT

SEQ ID NO: 3203 - protein, 14 aa, synthetic construct
GHDSPHKSGQSQQI

SEQ ID NO: 3204 - protein, 14 aa, synthetic construct
GHDSPHKSRQAQQT

SEQ ID NO: 3205 - protein, 14 aa, synthetic construct
GHDSPHKSVQNHQI

SEQ ID NO: 3206 - protein, 14 aa, synthetic construct
GHDSPHKSKQNQQA

SEQ ID NO: 3207 - protein, 14 aa, synthetic construct
GHDSPHKSAQNQLN

SEQ ID NO: 3208 - protein, 14 aa, synthetic construct
GHDSPHKSGQTQPT

SEQ ID NO: 3209 - protein, 14 aa, synthetic construct
FHDSPHKSGQNQQT

SEQ ID NO: 3210 - protein, 14 aa, synthetic construct
GHDSPHKLWINQQT

SEQ ID NO: 3211 - protein, 14 aa, synthetic construct
GPDSPHKSGQNQQT

SEQ ID NO: 3212 - protein, 14 aa, synthetic construct
GHDSPHKSVQKQLT

SEQ ID NO: 3213 - protein, 14 aa, synthetic construct
GHDSPHKSGRNQLA

SEQ ID NO: 3214 - protein, 14 aa, synthetic construct
VHDSPHKSGQNQQS

SEQ ID NO: 3215 - protein, 14 aa, synthetic construct
GHDSPHKMGRNQQS

SEQ ID NO: 3216 - protein, 14 aa, synthetic construct
GHDSPHKSGISIQT

SEQ ID NO: 3217 - protein, 14 aa, synthetic construct
VHDSPHKSGQNQQT

SEQ ID NO: 3218 - protein, 14 aa, synthetic construct
GHDSPHKSVQNLQT

SEQ ID NO: 3219 - protein, 14 aa, synthetic construct
GHDSPHKMAHNQQT

SEQ ID NO: 3220 - protein, 14 aa, synthetic construct
GHDSPHKHGQNQQN

SEQ ID NO: 3221 - protein, 14 aa, synthetic construct
GHDSPHKSVQSQQS

SEQ ID NO: 3222 - protein, 14 aa, synthetic construct
GHDSPHKSGQTVCT

SEQ ID NO: 3223 - protein, 14 aa, synthetic construct
GQDSPHKSGQYQQI

SEQ ID NO: 3224 - protein, 14 aa, synthetic construct
GHDSPHKSGQQIMT

SEQ ID NO: 3225 - protein, 14 aa, synthetic construct
GHDSPHKSRQNEQS

SEQ ID NO: 3226 - protein, 14 aa, synthetic construct
GHDSPHKSGLNHQT

SEQ ID NO: 3227 - protein, 14 aa, synthetic construct
GYDSPHKSGQNQQT

SEQ ID NO: 3228 - protein, 14 aa, synthetic construct
GHDSPHKSGQNLQT

SEQ ID NO: 3229 - protein, 14 aa, synthetic construct
GHDSPHKSRQDQQT

SEQ ID NO: 3230 - protein, 14 aa, synthetic construct
GDDSPHKSGQKQLT

SEQ ID NO: 3231 - protein, 14 aa, synthetic construct
GDDSPHKSGHNQQT

SEQ ID NO: 3232 - protein, 14 aa, synthetic construct
GHDSPHKSGQMIHT

SEQ ID NO: 3233 - protein, 14 aa, synthetic construct
GHDSPHKSGRNHQS

SEQ ID NO: 3234 - protein, 14 aa, synthetic construct
GHDSPHKSVQNRQT

SEQ ID NO: 3235 - protein, 14 aa, synthetic construct
GHDSPHKSGQKMNT

SEQ ID NO: 3236 - protein, 14 aa, synthetic construct
GHDSPHKSGQSQQN

SEQ ID NO: 3237 - protein, 14 aa, synthetic construct
GHDSPHKSGQYQHA

SEQ ID NO: 3238 - protein, 4 aa, synthetic construct
QERS

SEQ ID NO: 3239 - protein, 18 aa, synthetic construct
KTIIGSGSPHSKAQNRHT

SEQ ID NO: 3240 - protein, 18 aa, synthetic construct
KTFPGSGSPHSKVQNQQT

SEQ ID NO: 3241 - protein, 18 aa, synthetic construct
KTEKMSGSPHSKAQNQQT

SEQ ID NO: 3242 - protein, 18 aa, synthetic construct
KTVNGSGSPHSKARDQQT

SEQ ID NO: 3243 - protein, 18 aa, synthetic construct
KTFNGSGSPHSKAPNLQT

SEQ ID NO: 3244 - protein, 18 aa, synthetic construct
KTEKTSGSPHSKAQNQQT

SEQ ID NO: 3245 - protein, 18 aa, synthetic construct
KTINGSGSPHSKAHVRQT

SEQ ID NO: 3246 - protein, 18 aa, synthetic construct
KTVNGSGSPHSKAPNQHT

SEQ ID NO: 3247 - protein, 18 aa, synthetic construct
KTEKISGSPHSKAQNQQT

SEQ ID NO: 3248 - protein, 18 aa, synthetic construct
KTVNGSGSPHSKTQSQQT

SEQ ID NO: 3249 - protein, 18 aa, synthetic construct
TTINGSGSPHSKAQNQQT

SEQ ID NO: 3250 - protein, 18 aa, synthetic construct
KSINESGSPHSKAQNQQI

SEQ ID NO: 3251 - protein, 18 aa, synthetic construct
KTERTSGSPHSKAQNQQT

SEQ ID NO: 3252 - protein, 18 aa, synthetic construct
KTINGSGSPHSKAQPAKT

SEQ ID NO: 3253 - protein, 18 aa, synthetic construct
KTEKSSGSPHSKAQNQQT

SEQ ID NO: 3254 - protein, 18 aa, synthetic construct
KTEKGSGSPHSKAQNQQT

SEQ ID NO: 3255 - protein, 18 aa, synthetic construct
KTINGSGSPHSKSQTQQN

SEQ ID NO: 3256 - protein, 18 aa, synthetic construct
KTERISGSPHSKAQNQQT

SEQ ID NO: 3257 - protein, 18 aa, synthetic construct
KTERASGSPHSKAQNQQT

SEQ ID NO: 3258 - protein, 18 aa, synthetic construct
KELHGSGSPHSKAQNQQT

SEQ ID NO: 3259 - protein, 18 aa, synthetic construct
KAINGSGSPHSKAQNLAT

SEQ ID NO: 3260 - protein, 18 aa, synthetic construct
KTVNGSGSPHSKSQNQLT

SEQ ID NO: 3261 - protein, 18 aa, synthetic construct
KTERNSGSPHSKAQNQQT

SEQ ID NO: 3262 - protein, 18 aa, synthetic construct
KTFNGSGSPHSKAQGQQT

SEQ ID NO: 3263 - protein, 18 aa, synthetic construct
KTERVSGSPHSKAQNQQT

SEQ ID NO: 3264 - protein, 18 aa, synthetic construct
KTINGSGSPHSKALNRQS

SEQ ID NO: 3265 - protein, 18 aa, synthetic construct
KTERLSGSPHSKAQNQQT

SEQ ID NO: 3266 - protein, 18 aa, synthetic construct
KTDNGSGSPHSKAHNQQT

SEQ ID NO: 3267 - protein, 18 aa, synthetic construct
KTFHGSGSPHSKTQNQQT

SEQ ID NO: 3268 - protein, 18 aa, synthetic construct
KTSNGSGSPHSKAQNPPT

SEQ ID NO: 3269 - protein, 18 aa, synthetic construct
ETINGSGSPHSKAQNLQT

SEQ ID NO: 3270 - protein, 18 aa, synthetic construct
NTINGSGSPHSKAQNQQT

SEQ ID NO: 3271 - protein, 18 aa, synthetic construct
KTENMSGSPHSKAQNQQT

SEQ ID NO: 3272 - protein, 18 aa, synthetic construct
KTENVSGSPHSKAQNQQT

SEQ ID NO: 3273 - protein, 18 aa, synthetic construct
KTSSGSGSPHSKAQYQQT

SEQ ID NO: 3274 - protein, 18 aa, synthetic construct
KTEKVSGSPHSKAQNQQT

SEQ ID NO: 3275 - protein, 18 aa, synthetic construct
KAINGSGSPHSKAQDQET

SEQ ID NO: 3276 - protein, 18 aa, synthetic construct
KTCNKSGSPHSKAQNQQT

SEQ ID NO: 3277 - protein, 18 aa, synthetic construct
KTEHLSGSPHSKAQNQQT

SEQ ID NO: 3278 - protein, 18 aa, synthetic construct
KAEMGSGSPHSKAQNQQT

SEQ ID NO: 3279 - protein, 18 aa, synthetic construct
KATNGSGSPHSKAQNHQT

SEQ ID NO: 3280 - protein, 18 aa, synthetic construct
KAIKGSGSPHSKAQDQQT

SEQ ID NO: 3281 - protein, 18 aa, synthetic construct
KTINGSGSPHSKGHWQQT

SEQ ID NO: 3282 - protein, 18 aa, synthetic construct
KTDKTSGSPHSKAQNQQT

SEQ ID NO: 3283 - protein, 18 aa, synthetic construct
KTFKGSGSPHSKAPNQQT

SEQ ID NO: 3284 - protein, 18 aa, synthetic construct
KTVNGSGSPHSKAQNQLI

SEQ ID NO: 3285 - protein, 18 aa, synthetic construct
KTINGSGSPHSKRPEQQT

SEQ ID NO: 3286 - protein, 18 aa, synthetic construct
KTINGSGSPHSKAQRTMT

SEQ ID NO: 3287 - protein, 18 aa, synthetic construct
KTEKASGSPHSKAQNQQT

SEQ ID NO: 3288 - protein, 18 aa, synthetic construct
KSDQGSGSPHSKAQNQQT

SEQ ID NO: 3289 - protein, 18 aa, synthetic construct
KTEITSGSPHSKAQNQQT

SEQ ID NO: 3290 - protein, 18 aa, synthetic construct
KTDKSSGSPHSKAQNQQT

SEQ ID NO: 3291 - protein, 18 aa, synthetic construct
KTIDGSGSPHSKAQNQQH

SEQ ID NO: 3292 - protein, 18 aa, synthetic construct
KNTNGSGSPHSKAQNQQT

SEQ ID NO: 3293 - protein, 18 aa, synthetic construct
KTETHSGSPHSKAQNQQT

SEQ ID NO: 3294 - protein, 18 aa, synthetic construct
KTINGSGSPHSKALHQHT

SEQ ID NO: 3295 - protein, 18 aa, synthetic construct
KTINGSGSPHSKAQHRIT

SEQ ID NO: 3296 - protein, 18 aa, synthetic construct
KTINGSGSPHSKAQYIHT

SEQ ID NO: 3297 - protein, 18 aa, synthetic construct
KTENISGSPHSKAQNQQT

SEQ ID NO: 3298 - protein, 18 aa, synthetic construct
KTINGSGSPHSKAQKFET

SEQ ID NO: 3299 - protein, 18 aa, synthetic construct
KTSNESGSPHSKAQNHQT

SEQ ID NO: 3300 - protein, 18 aa, synthetic construct
KTINGSGSPHSKAQFPST

SEQ ID NO: 3301 - protein, 18 aa, synthetic construct
KTERPSGSPHSKAQNQQT

SEQ ID NO: 3302 - protein, 18 aa, synthetic construct
KTERMSGSPHSKAQNQQT

SEQ ID NO: 3303 - protein, 18 aa, synthetic construct
KTERSSGSPHSKAQNQQT

SEQ ID NO: 3304 - protein, 18 aa, synthetic construct
KTELHSGSPHSKAQNQQT

SEQ ID NO: 3305 - protein, 18 aa, synthetic construct
KTELTSGSPHSKAQNQQT

SEQ ID NO: 3306 - protein, 18 aa, synthetic construct
KTINGSGSPHSKAHNQQR

SEQ ID NO: 3307 - protein, 18 aa, synthetic construct
KTINGSGSPHSKAQAIKT

SEQ ID NO: 3308 - protein, 18 aa, synthetic construct
KTENTSGSPHSKAQNQQT

SEQ ID NO: 3309 - protein, 18 aa, synthetic construct
KTIDGSGSPHSKGQNRQT

SEQ ID NO: 3310 - protein, 18 aa, synthetic construct
KNINGSGSPHSKAQSQQT

SEQ ID NO: 3311 - protein, 18 aa, synthetic construct
KTSNASGSPHSKAQNQLT

SEQ ID NO: 3312 - protein, 18 aa, synthetic construct
KTEARSGSPHSKAQNQQT

SEQ ID NO: 3313 - protein, 18 aa, synthetic construct
KTEKNSGSPHSKAQNQQT

SEQ ID NO: 3314 - protein, 18 aa, synthetic construct
KTANGSGSPHSKAQYQQT

SEQ ID NO: 3315 - protein, 18 aa, synthetic construct
KTVNGSGSPHSKAQYQHT

SEQ ID NO: 3316 - protein, 18 aa, synthetic construct
KTINGSGSPHTKAQNPQS

SEQ ID NO: 3317 - protein, 18 aa, synthetic construct
KTINGSGSPHSKGQNPPT

SEQ ID NO: 3318 - protein, 18 aa, synthetic construct
KTIIGSGSPHSKAQHQLT

SEQ ID NO: 3319 - protein, 18 aa, synthetic construct
KTINGSGSPHSKAQSPPT

SEQ ID NO: 3320 - protein, 18 aa, synthetic construct
NTIYGSGSPHSKAQNQQT

SEQ ID NO: 3321 - protein, 18 aa, synthetic construct
KTINGSGSPHSKAQAKLT

SEQ ID NO: 3322 - protein, 18 aa, synthetic construct
KTDKNSGSPHSKAQNQQT

SEQ ID NO: 3323 - protein, 18 aa, synthetic construct
KTINGSGSPHSKTKSQQT

SEQ ID NO: 3324 - protein, 18 aa, synthetic construct
KTINGSGSPHSKAQDRPT

SEQ ID NO: 3325 - protein, 18 aa, synthetic construct
KTINGSGSPHSKAQSQQL

SEQ ID NO: 3326 - protein, 18 aa, synthetic construct
KTENLSGSPHSKAQNQQT

SEQ ID NO: 3327 - protein, 18 aa, synthetic construct
KTINGSGSPHSKAQAFHT

SEQ ID NO: 3328 - protein, 18 aa, synthetic construct
KTINGSGSPHSKAQKQQD

SEQ ID NO: 3329 - protein, 18 aa, synthetic construct
KTFSGSGSPHSKAQNLQT

SEQ ID NO: 3330 - protein, 18 aa, synthetic construct
KAINGSGSPHSKAQNAQT

SEQ ID NO: 3331 - protein, 18 aa, synthetic construct
KTESWSGSPHSKAQNQQT

SEQ ID NO: 3332 - protein, 18 aa, synthetic construct
KTTNGSGSPHSKAHNQLT

SEQ ID NO: 3333 - protein, 18 aa, synthetic construct
KTEDKSGSPHSKAQNQQT

SEQ ID NO: 3334 - protein, 18 aa, synthetic construct
KTESASGSPHSKAQNQQT

SEQ ID NO: 3335 - protein, 18 aa, synthetic construct
KTNNGSGSPHSKAQNQQY

SEQ ID NO: 3336 - protein, 18 aa, synthetic construct
KTDKMSGSPHSKAQNQQT

SEQ ID NO: 3337 - protein, 18 aa, synthetic construct
KEVHGSGSPHSKAQNQQT

SEQ ID NO: 3338 - protein, 18 aa, synthetic construct
KTINGSGSPHSKAQKLNT

SEQ ID NO: 3339 - protein, 18 aa, synthetic construct
KTTNGSGSPHSKAQYQHT

SEQ ID NO: 3340 - protein, 18 aa, synthetic construct
KTISGSGSPHSKAQYQHT

SEQ ID NO: 3341 - protein, 18 aa, synthetic construct
KTESTSGSPHSKAQNQQT

SEQ ID NO: 3342 - protein, 18 aa, synthetic construct
KTINGSGSPHSKSQNVQT

SEQ ID NO: 3343 - protein, 18 aa, synthetic construct
KSINGSGSPHSKAQAQQT

SEQ ID NO: 3344 - protein, 18 aa, synthetic construct
KTVNGSGSPHSKAQNLQA

SEQ ID NO: 3345 - protein, 18 aa, synthetic construct
KTVRDSGSPHSKAQNQQT

SEQ ID NO: 3346 - protein, 18 aa, synthetic construct
KTFNASGSPHSKAPNQQT

SEQ ID NO: 3347 - protein, 18 aa, synthetic construct
KTDRMSGSPHSKAQNQQT

SEQ ID NO: 3348 - protein, 18 aa, synthetic construct
KTINGSGSPHSKAQTPPT

SEQ ID NO: 3349 - protein, 18 aa, synthetic construct
ETIKGSGSPHSKAQNQQT

SEQ ID NO: 3350 - protein, 18 aa, synthetic construct
KNHIGSGSPHSKAQNQQT

SEQ ID NO: 3351 - protein, 18 aa, synthetic construct
KTINGSGSPHSKAQYQHA

SEQ ID NO: 3352 - protein, 18 aa, synthetic construct
KTINGSGSPHSKAQGQQA

SEQ ID NO: 3353 - protein, 18 aa, synthetic construct
KTFNGSGSPHNKAQNHQT

SEQ ID NO: 3354 - protein, 18 aa, synthetic construct
KESDGSGSPHSKAQNQQT

SEQ ID NO: 3355 - protein, 18 aa, synthetic construct
KTINGSGSPHSKAQPPAT

SEQ ID NO: 3356 - protein, 18 aa, synthetic construct
KTINGSGSPHSKAQERPT

SEQ ID NO: 3357 - protein, 18 aa, synthetic construct
KTIKGSGSPHSKAQDLQT

SEQ ID NO: 3358 - protein, 18 aa, synthetic construct
KTDLKSGSPHSKAQNQQT

SEQ ID NO: 3359 - protein, 18 aa, synthetic construct
KTINGSGSPHSKAQAMHT

SEQ ID NO: 3360 - protein, 18 aa, synthetic construct
KTVPNSGSPHSKAQNQQT

SEQ ID NO: 3361 - protein, 18 aa, synthetic construct
KTVIGSGSPHSKALNQQT

SEQ ID NO: 3362 - protein, 18 aa, synthetic construct
KTINGSGSPHSKAQHPST

SEQ ID NO: 3363 - protein, 18 aa, synthetic construct
KTINGSGSPHSKAPGLQT

SEQ ID NO: 3364 - protein, 18 aa, synthetic construct
KTINGSGSPHSKAQGIRT

SEQ ID NO: 3365 - protein, 18 aa, synthetic construct
KTESHSGSPHSKAQNQQT

SEQ ID NO: 3366 - protein, 18 aa, synthetic construct
KTINGSGSPHSKAQAPAT

SEQ ID NO: 3367 - protein, 18 aa, synthetic construct
KTINGSGSPHSKSQSQQI

SEQ ID NO: 3368 - protein, 18 aa, synthetic construct
KAEHGSGSPHSKAQNQQT

SEQ ID NO: 3369 - protein, 18 aa, synthetic construct
KTEDRSGSPHSKAQNQQT

SEQ ID NO: 3370 - protein, 18 aa, synthetic construct
KNCLGSGSPHSKAQNQQT

SEQ ID NO: 3371 - protein, 18 aa, synthetic construct
KTDRGSGSPHSKAQNQQT

SEQ ID NO: 3372 - protein, 18 aa, synthetic construct
KTINGSGSPHSKAQIPPT

SEQ ID NO: 3373 - protein, 18 aa, synthetic construct
KTVKGSGSPHSKAQDQQT

SEQ ID NO: 3374 - protein, 18 aa, synthetic construct
KNADGSGSPHSKAQNQQT

SEQ ID NO: 3375 - protein, 18 aa, synthetic construct
KTDKVSGSPHSKAQNQQT

SEQ ID NO: 3376 - protein, 18 aa, synthetic construct
KTITGSGSPHSKAQTQLT

SEQ ID NO: 3377 - protein, 18 aa, synthetic construct
KTINGSGSPHSKAQAPST

SEQ ID NO: 3378 - protein, 18 aa, synthetic construct
KNCVGSGSPHSKAQNQQT

SEQ ID NO: 3379 - protein, 18 aa, synthetic construct
KTVKDSGSPHSKAQNQQT

SEQ ID NO: 3380 - protein, 18 aa, synthetic construct
KNALGSGSPHSKAQNQQT

SEQ ID NO: 3381 - protein, 18 aa, synthetic construct
KVINGSGSPHSKGQNQQT

SEQ ID NO: 3382 - protein, 18 aa, synthetic construct
KTSNASGSPHSKAHNQQT

SEQ ID NO: 3383 - protein, 18 aa, synthetic construct
KTINGSGSPHSKAQNTYA

SEQ ID NO: 3384 - protein, 18 aa, synthetic construct
KTINGSGSPHSKSQNQHI

SEQ ID NO: 3385 - protein, 18 aa, synthetic construct
KTEFVSGSPHSKAQNQQT

SEQ ID NO: 3386 - protein, 18 aa, synthetic construct
KTVNGSGSPHSKAQNHLT

SEQ ID NO: 3387 - protein, 18 aa, synthetic construct
KTREISGSPHSKAQNQQT

SEQ ID NO: 3388 - protein, 18 aa, synthetic construct
KTINGSGSPHSKAQIGMT

SEQ ID NO: 3389 - protein, 18 aa, synthetic construct
KTIDGSGSPHSKALNKQT

SEQ ID NO: 3390 - protein, 18 aa, synthetic construct
KQGEGSGSPHSKAQNQQT

SEQ ID NO: 3391 - protein, 18 aa, synthetic construct
KTVNGSGSPHSKAQLQQT

SEQ ID NO: 3392 - protein, 18 aa, synthetic construct
KSINGSGSPHSKTQSQQT

SEQ ID NO: 3393 - protein, 18 aa, synthetic construct
KSEKGSGSPHSKAQNQQT

SEQ ID NO: 3394 - protein, 18 aa, synthetic construct
KNVNGSGSPHSKAQNQQT

SEQ ID NO: 3395 - protein, 18 aa, synthetic construct
KGGEGSGSPHSKAQNQQT

SEQ ID NO: 3396 - protein, 18 aa, synthetic construct
KTINGSGSPHSKAQRMST

SEQ ID NO: 3397 - protein, 18 aa, synthetic construct
KTINGSGSPHSKAQGILT

SEQ ID NO: 3398 - protein, 18 aa, synthetic construct
KEFVGSGSPHSKAQNQQT

SEQ ID NO: 3399 - protein, 18 aa, synthetic construct
KTIIGSGSPHSKAQDRQT

SEQ ID NO: 3400 - protein, 18 aa, synthetic construct
KSDKGSGSPHSKAQNQQT

SEQ ID NO: 3401 - protein, 18 aa, synthetic construct
KTEQVSGSPHSKAQNQQT

SEQ ID NO: 3402 - protein, 18 aa, synthetic construct
KTEHVSGSPHSKAQNQQT

SEQ ID NO: 3403 - protein, 18 aa, synthetic construct
KTINGSGSPHSKARDWQT

SEQ ID NO: 3404 - protein, 18 aa, synthetic construct
KTENASGSPHSKAQNQQT

SEQ ID NO: 3405 - protein, 18 aa, synthetic construct
KEVQGSGSPHSKAQNQQT

SEQ ID NO: 3406 - protein, 18 aa, synthetic construct
KTINGSGSPHSKAQNTHD

SEQ ID NO: 3407 - protein, 18 aa, synthetic construct
KTINGSGSPHSKAPNLQI

SEQ ID NO: 3408 - protein, 18 aa, synthetic construct
KTINGSGSPHSKAQERST

SEQ ID NO: 3409 - protein, 18 aa, synthetic construct
KTSNGSGSPHSKAQNYQT

SEQ ID NO: 3410 - protein, 18 aa, synthetic construct
KTEYISGSPHSKAQNQQT

SEQ ID NO: 3411 - protein, 18 aa, synthetic construct
KTINGSGSPHSKAQRTCT

SEQ ID NO: 3412 - protein, 18 aa, synthetic construct
KTINGSGSPHSKAQIGHT

SEQ ID NO: 3413 - protein, 18 aa, synthetic construct
KNCWGSGSPHSKAQNQQT

SEQ ID NO: 3414 - protein, 18 aa, synthetic construct
KTINGSGSPHSKAQGAIT

SEQ ID NO: 3415 - protein, 18 aa, synthetic construct
KTDVNSGSPHSKAQNQQT

SEQ ID NO: 3416 - protein, 18 aa, synthetic construct
KSDIGSGSPHSKAQNQQT

SEQ ID NO: 3417 - protein, 18 aa, synthetic construct
KTINGSGSPHSKAQVPPT

SEQ ID NO: 3418 - protein, 18 aa, synthetic construct
KTINGSGSPHSKAQVQQI

SEQ ID NO: 3419 - protein, 18 aa, synthetic construct
KTINGSGSPHSKALMRQT

SEQ ID NO: 3420 - protein, 18 aa, synthetic construct
KTINGSGSPHSKAQYSVT

SEQ ID NO: 3421 - protein, 18 aa, synthetic construct
KNSIGSGSPHSKAQNQQT

SEQ ID NO: 3422 - protein, 18 aa, synthetic construct
KTINGSGSPHSKVPNLQT

SEQ ID NO: 3423 - protein, 18 aa, synthetic construct
KAINGSGSPHSKAQSQQI

SEQ ID NO: 3424 - protein, 18 aa, synthetic construct
KTINGSGSPHSKAQAITT

SEQ ID NO: 3425 - protein, 18 aa, synthetic construct
KTINGSGSPHSKAQKTLT

SEQ ID NO: 3426 - protein, 18 aa, synthetic construct
KTVNGSGSPHSKAQNQWT

SEQ ID NO: 3427 - protein, 18 aa, synthetic construct
KTINGSGSPHSKAQLHHT

SEQ ID NO: 3428 - protein, 18 aa, synthetic construct
KTEQTSGSPHSKAQNQQT

SEQ ID NO: 3429 - protein, 18 aa, synthetic construct
KTINGSGSPHSKAQNIII

SEQ ID NO: 3430 - protein, 18 aa, synthetic construct
KNSLGSGSPHSKAQNQQT

SEQ ID NO: 3431 - protein, 18 aa, synthetic construct
KTINGSGSPHSKAQGHHT

SEQ ID NO: 3432 - protein, 18 aa, synthetic construct
KTDRTSGSPHSKAQNQQT

SEQ ID NO: 3433 - protein, 18 aa, synthetic construct
KTINGSGSPHSKAQSKVT

SEQ ID NO: 3434 - protein, 18 aa, synthetic construct
KEVVGSGSPHSKAQNQQT

SEQ ID NO: 3435 - protein, 18 aa, synthetic construct
KTINGSGSPHSKAQLPST

SEQ ID NO: 3436 - protein, 18 aa, synthetic construct
KTINGSGSPHSKAIGKQT

SEQ ID NO: 3437 - protein, 18 aa, synthetic construct
KTEPTSGSPHSKAQNQQT

SEQ ID NO: 3438 - protein, 18 aa, synthetic construct
KTINGSGSPHSKAQAIHT

SEQ ID NO: 3439 - protein, 18 aa, synthetic construct
KTINGSGSPHSKAQHGLT

SEQ ID NO: 3440 - protein, 18 aa, synthetic construct
KSELGSGSPHSKAQNQQT

SEQ ID NO: 3441 - protein, 18 aa, synthetic construct
KTINGSGSPHSKAQFMCT

SEQ ID NO: 3442 - protein, 18 aa, synthetic construct
KTINVSGSPHSKAQGQQT

SEQ ID NO: 3443 - protein, 18 aa, synthetic construct
KTVNGSGSPHSKAQHLQT

SEQ ID NO: 3444 - protein, 18 aa, synthetic construct
KTINGSGSPHSKTQNHQN

SEQ ID NO: 3445 - protein, 18 aa, synthetic construct
KTINGSGSPHSKAQPART

SEQ ID NO: 3446 - protein, 18 aa, synthetic construct
KTVNGSGSPHSKAQSLQT

SEQ ID NO: 3447 - protein, 18 aa, synthetic construct
KTINGSGSPHSKSQSQLT

SEQ ID NO: 3448 - protein, 18 aa, synthetic construct
KTWQNSGSPHSKAQNQQT

SEQ ID NO: 3449 - protein, 18 aa, synthetic construct
KTINGSGSPHSKAQDRQS

SEQ ID NO: 3450 - protein, 18 aa, synthetic construct
KTINGSGSPHSKAQMPST

SEQ ID NO: 3451 - protein, 18 aa, synthetic construct
KTINGSGSPHSKAQGSLT

SEQ ID NO: 3452 - protein, 18 aa, synthetic construct
KTEVTSGSPHSKAQNQQT

SEQ ID NO: 3453 - protein, 18 aa, synthetic construct
KTVIGSGSPHSKSQNQQT

SEQ ID NO: 3454 - protein, 18 aa, synthetic construct
KAVNVSGSPHSKAQNQQT

SEQ ID NO: 3455 - protein, 18 aa, synthetic construct
KTDRNSGSPHSKAQNQQT

SEQ ID NO: 3456 - protein, 18 aa, synthetic construct
KTINGSGSPHSKAQVPAT

SEQ ID NO: 3457 - protein, 18 aa, synthetic construct
KGVLGSGSPHSKAQNQQT

SEQ ID NO: 3458 - protein, 18 aa, synthetic construct
KAINGSGSPHSKAQDKQT

SEQ ID NO: 3459 - protein, 18 aa, synthetic construct
KTSNGSGSPHSKAHYQQT

SEQ ID NO: 3460 - protein, 18 aa, synthetic construct
KTINGSGSPHSKAQVPST

SEQ ID NO: 3461 - protein, 18 aa, synthetic construct
KTELRSGSPHSKAQNQQT

SEQ ID NO: 3462 - protein, 18 aa, synthetic construct
KNINGSGSPHSKAQNHQT

SEQ ID NO: 3463 - protein, 18 aa, synthetic construct
KTINGSGSPHSKARGEQT

SEQ ID NO: 3464 - protein, 18 aa, synthetic construct
KTEDLSGSPHSKAQNQQT

SEQ ID NO: 3465 - protein, 18 aa, synthetic construct
KTINGSGSPHSKAPGQQT

SEQ ID NO: 3466 - protein, 18 aa, synthetic construct
KTINGSGSPHSKAQSLQI

SEQ ID NO: 3467 - protein, 18 aa, synthetic construct
KTINGSGSPHSKRLEQQT

SEQ ID NO: 3468 - protein, 18 aa, synthetic construct
KTERGSGSPHSKAQNQQT

SEQ ID NO: 3469 - protein, 18 aa, synthetic construct
KTVNGSGSPHSKAPNQQT

SEQ ID NO: 3470 - protein, 18 aa, synthetic construct
KTSNGSGSPHSKAQNQST

SEQ ID NO: 3471 - protein, 18 aa, synthetic construct
KTINGSGSPHSKAQKVIT

SEQ ID NO: 3472 - protein, 18 aa, synthetic construct
KTEGISGSPHSKAQNQQT

SEQ ID NO: 3473 - protein, 18 aa, synthetic construct
KTINGSGSPHSKAQNNDQ

SEQ ID NO: 3474 - protein, 18 aa, synthetic construct
KTINGSGSPHSKAQSVHT

SEQ ID NO: 3475 - protein, 18 aa, synthetic construct
KTINGSGSPHSKAQPLGT

SEQ ID NO: 3476 - protein, 18 aa, synthetic construct
KTCNASGSPHSKAQNQQT

SEQ ID NO: 3477 - protein, 18 aa, synthetic construct
KAINGSGSPHSKAHNQET

SEQ ID NO: 3478 - protein, 18 aa, synthetic construct
KTEGLSGSPHSKAQNQQT

SEQ ID NO: 3479 - protein, 18 aa, synthetic construct
KTRDASGSPHSKAQNQQT

SEQ ID NO: 3480 - protein, 18 aa, synthetic construct
KTSNGSGSPHSKAQNLQI

SEQ ID NO: 3481 - protein, 18 aa, synthetic construct
KTGNGSGSPHSKAQIQQT

SEQ ID NO: 3482 - protein, 18 aa, synthetic construct
KTDRSSGSPHSKAQNQQT

SEQ ID NO: 3483 - protein, 18 aa, synthetic construct
KTINGSGSPHSKAQVRNT

SEQ ID NO: 3484 - protein, 18 aa, synthetic construct
KTINGSGSPHSKAPSNQT

SEQ ID NO: 3485 - protein, 18 aa, synthetic construct
KTINGSGSPHSKAQVGHT

SEQ ID NO: 3486 - protein, 18 aa, synthetic construct
KNAIGSGSPHSKAQNQQT

SEQ ID NO: 3487 - protein, 18 aa, synthetic construct
KAENGSGSPHSKAQNQQT

SEQ ID NO: 3488 - protein, 18 aa, synthetic construct
KTINGSGSPHSKAQRDIT

SEQ ID NO: 3489 - protein, 18 aa, synthetic construct
KTINGSGSPHSKAQMPNT

SEQ ID NO: 3490 - protein, 18 aa, synthetic construct
KTVNGSGSPHSKSQNQQT

SEQ ID NO: 3491 - protein, 18 aa, synthetic construct
KTINGSGSPHSKARGLQT

SEQ ID NO: 3492 - protein, 18 aa, synthetic construct
KTELGSGSPHSKAQNQQT

SEQ ID NO: 3493 - protein, 18 aa, synthetic construct
KAETGSGSPHSKAQNQQT

SEQ ID NO: 3494 - protein, 18 aa, synthetic construct
KTINGSGSPHSKLQKQQT

SEQ ID NO: 3495 - protein, 18 aa, synthetic construct
KTINGSGSPHSKAPSLQT

SEQ ID NO: 3496 - protein, 18 aa, synthetic construct
KTINGSGSPHSKAQRDQT

SEQ ID NO: 3497 - protein, 18 aa, synthetic construct
KTDVGSGSPHSKAQNQQT

SEQ ID NO: 3498 - protein, 18 aa, synthetic construct
KTINGSGSPHSKNRDQQT

SEQ ID NO: 3499 - protein, 18 aa, synthetic construct
KSINGSGSPHSKAPNLQT

SEQ ID NO: 3500 - protein, 18 aa, synthetic construct
KTINGSGSPHSKAQAKGT

SEQ ID NO: 3501 - protein, 18 aa, synthetic construct
KTVNGSGSPHSKAQDKQT

SEQ ID NO: 3502 - protein, 18 aa, synthetic construct
KTINGSGSPHSKAQSAHT

SEQ ID NO: 3503 - protein, 18 aa, synthetic construct
KTVPTSGSPHSKAQNQQT

SEQ ID NO: 3504 - protein, 18 aa, synthetic construct
KTIDGSGSPHSKSQNHQT

SEQ ID NO: 3505 - protein, 18 aa, synthetic construct
KTDVKSGSPHSKAQNQQT

SEQ ID NO: 3506 - protein, 18 aa, synthetic construct
KAINRSGSPHSKAQDQQT

SEQ ID NO: 3507 - protein, 18 aa, synthetic construct
KTINGSGSPHSKAQSTMT

SEQ ID NO: 3508 - protein, 18 aa, synthetic construct
KTVNASGSPHSKAQNQLT

SEQ ID NO: 3509 - protein, 18 aa, synthetic construct
KTINGSGSPHSKAQREMT

SEQ ID NO: 3510 - protein, 18 aa, synthetic construct
KTVHGSGSPHSKAQSQQT

SEQ ID NO: 3511 - protein, 18 aa, synthetic construct
KTINGSGSPHSKAQYRAT

SEQ ID NO: 3512 - protein, 18 aa, synthetic construct
KTEPMSGSPHSKAQNQQT

SEQ ID NO: 3513 - protein, 18 aa, synthetic construct
KTINGSGSPHSKNQWQQT

SEQ ID NO: 3514 - protein, 18 aa, synthetic construct
KETAGSGSPHSKAQNQQT

SEQ ID NO: 3515 - protein, 18 aa, synthetic construct
KTINGSGSPHSKAQRMNT

SEQ ID NO: 3516 - protein, 18 aa, synthetic construct
KNNLGSGSPHSKAQNQQT

SEQ ID NO: 3517 - protein, 18 aa, synthetic construct
KTINGSGSPHAKAQNHQT

SEQ ID NO: 3518 - protein, 18 aa, synthetic construct
KTINGSGSPHSKAGDSQT

SEQ ID NO: 3519 - protein, 18 aa, synthetic construct
KTINGSGSPHSKLKSQQT

SEQ ID NO: 3520 - protein, 18 aa, synthetic construct
KTINGSGSPHSKAQKIST

SEQ ID NO: 3521 - protein, 18 aa, synthetic construct
KTEYNSGSPHSKAQNQQT

SEQ ID NO: 3522 - protein, 18 aa, synthetic construct
KTINGSGSPHSKAPSMQT

SEQ ID NO: 3523 - protein, 18 aa, synthetic construct
EAINGSGSPHSKAQNQQT

SEQ ID NO: 3524 - protein, 18 aa, synthetic construct
KTINGSGSPHSKASPRQT

SEQ ID NO: 3525 - protein, 18 aa, synthetic construct
KTINGSGSPHSKRMEQQT

SEQ ID NO: 3526 - protein, 18 aa, synthetic construct
KTINGSGSPHSKAQYQNT

SEQ ID NO: 3527 - protein, 18 aa, synthetic construct
KEINGRGSPHSKAQNQQT

SEQ ID NO: 3528 - protein, 18 aa, synthetic construct
KTVNRNGSPHSKAQNQQT

SEQ ID NO: 3529 - protein, 18 aa, synthetic construct
KTINGPGSPHSKAHNQQT

SEQ ID NO: 3530 - protein, 18 aa, synthetic construct
KTSYGNGSPHSKAQNQQT

SEQ ID NO: 3531 - protein, 18 aa, synthetic construct
KSVNGNGSPHSKAQNQQT

SEQ ID NO: 3532 - protein, 18 aa, synthetic construct
KTINGSGSPHGWVQNQQT

SEQ ID NO: 3533 - protein, 18 aa, synthetic construct
KTINGGGSPHSKAQTQQI

SEQ ID NO: 3534 - protein, 18 aa, synthetic construct
KTVHGNGSPHSKAQNQQT

SEQ ID NO: 3535 - protein, 18 aa, synthetic construct
KTINGGGSPHSKAQNQQC

SEQ ID NO: 3536 - protein, 18 aa, synthetic construct
KTIDGGGSPHSKAQNKQT

SEQ ID NO: 3537 - protein, 18 aa, synthetic construct
KTINGGGSPHSKAQNQLI

SEQ ID NO: 3538 - protein, 18 aa, synthetic construct
KNINGGGSPHSKAQNQQT

SEQ ID NO: 3539 - protein, 18 aa, synthetic construct
KTINGGGSPHSKSQNQLT

SEQ ID NO: 3540 - protein, 18 aa, synthetic construct
KTVNGNGSPHSKAQNKQT

SEQ ID NO: 3541 - protein, 18 aa, synthetic construct
KTVNGNGSPHSKAQNQHT

SEQ ID NO: 3542 - protein, 18 aa, synthetic construct
KTINGGGSPHSKALNQQN

SEQ ID NO: 3543 - protein, 18 aa, synthetic construct
KTINGTGSPHSKAQNHQI

SEQ ID NO: 3544 - protein, 18 aa, synthetic construct
KTIIGGGSPHSKAHNQQT

SEQ ID NO: 3545 - protein, 18 aa, synthetic construct
KTINGNGSPHSKAQNPLT

SEQ ID NO: 3546 - protein, 18 aa, synthetic construct
KSIKGNGSPHSKAQNQQT

SEQ ID NO: 3547 - protein, 18 aa, synthetic construct
KTINGGGSPHSKAQSQQI

SEQ ID NO: 3548 - protein, 18 aa, synthetic construct
KTINGSVSPHGKAQNQLT

SEQ ID NO: 3549 - protein, 18 aa, synthetic construct
KTINGIGSPHSKAQNLGT

SEQ ID NO: 3550 - protein, 18 aa, synthetic construct
KTVNGNGSPHSKAQNHQT

SEQ ID NO: 3551 - protein, 18 aa, synthetic construct
KTSNGGGSPHSKAQNLQT

SEQ ID NO: 3552 - protein, 18 aa, synthetic construct
KTINGGGSPHSKSQNQHT

SEQ ID NO: 3553 - protein, 18 aa, synthetic construct
KTVNGGGSPHSKAQSQQT

SEQ ID NO: 3554 - protein, 18 aa, synthetic construct
KTIPIDGSPHSKAQNQQT

SEQ ID NO: 3555 - protein, 18 aa, synthetic construct
KTINGGGSPHSKAQNPPT

SEQ ID NO: 3556 - protein, 18 aa, synthetic construct
KTINGLGSPHSKSQNQQT

SEQ ID NO: 3557 - protein, 18 aa, synthetic construct
KTINGTGSPHSKAQNQQM

SEQ ID NO: 3558 - protein, 18 aa, synthetic construct
KTIRDAGSPHSKAQNQQT

SEQ ID NO: 3559 - protein, 18 aa, synthetic construct
KTVNGGGSPHSKAQNQQS

SEQ ID NO: 3560 - protein, 18 aa, synthetic construct
KTIQDGGSPHSKAQNQQT

SEQ ID NO: 3561 - protein, 18 aa, synthetic construct
KTISGGGSPHSKAQNQQN

SEQ ID NO: 3562 - protein, 18 aa, synthetic construct
KTINGGGSPHSKAQDKQT

SEQ ID NO: 3563 - protein, 18 aa, synthetic construct
KTIIGGGSPHSKAQNPQT

SEQ ID NO: 3564 - protein, 18 aa, synthetic construct
KTINGTGSPHSKAPNQLT

SEQ ID NO: 3565 - protein, 18 aa, synthetic construct
KTFNGGGSPHSKAQYQQT

SEQ ID NO: 3566 - protein, 18 aa, synthetic construct
KTVNGGGSPHSKAQHQQT

SEQ ID NO: 3567 - protein, 18 aa, synthetic construct
KTIPMEGSPHSKAQNQQT

SEQ ID NO: 3568 - protein, 18 aa, synthetic construct
KTVNGGGSPHSKSQNQQT

SEQ ID NO: 3569 - protein, 18 aa, synthetic construct
KTINGGGSPHSKAQNQMT

SEQ ID NO: 3570 - protein, 18 aa, synthetic construct
KTIRENGSPHSKAQNQQT

SEQ ID NO: 3571 - protein, 18 aa, synthetic construct
KTINGSASPHSKAHSQQT

SEQ ID NO: 3572 - protein, 18 aa, synthetic construct
KTNNGGGSPHSKAQNLQT

SEQ ID NO: 3573 - protein, 18 aa, synthetic construct
KSINGGGSPHSKAQYQQT

SEQ ID NO: 3574 - protein, 18 aa, synthetic construct
KTVNGNGSPHSKSQNQQT

SEQ ID NO: 3575 - protein, 18 aa, synthetic construct
KTLNGNGSPHSKAQNLQT

SEQ ID NO: 3576 - protein, 18 aa, synthetic construct
KTINGSGSSHSKAQNQQT

SEQ ID NO: 3577 - protein, 18 aa, synthetic construct
KTVNGGGSPHSKAQNHQT

SEQ ID NO: 3578 - protein, 18 aa, synthetic construct
KTINGGGSPHSKAQYQHT

SEQ ID NO: 3579 - protein, 18 aa, synthetic construct
KTIPKNGSPHSKAQNQQT

SEQ ID NO: 3580 - protein, 18 aa, synthetic construct
KTINKEGSPHSKAQNQQT

SEQ ID NO: 3581 - protein, 18 aa, synthetic construct
KTVNGGGSPHSKAQNLQT

SEQ ID NO: 3582 - protein, 18 aa, synthetic construct
KTIPAIGSPHSKAQNQQT

SEQ ID NO: 3583 - protein, 18 aa, synthetic construct
KTINGGGSPHSKAQNPQA

SEQ ID NO: 3584 - protein, 18 aa, synthetic construct
KTINGNGSPHSKSQNQHT

SEQ ID NO: 3585 - protein, 18 aa, synthetic construct
KTINGGGSPHSKSQNRQT

SEQ ID NO: 3586 - protein, 18 aa, synthetic construct
KTINGGGSPHSKAQRQQT

SEQ ID NO: 3587 - protein, 18 aa, synthetic construct
KTIIKNGSPHSKAQNQQT

SEQ ID NO: 3588 - protein, 18 aa, synthetic construct
KTINGSGSPHSYHVNQQT

SEQ ID NO: 3589 - protein, 18 aa, synthetic construct
KTERVSGSPHSKAQNQQT

SEQ ID NO: 3590 - protein, 4 aa, synthetic construct
QNYQ

SEQ ID NO: 3591 - protein, 18 aa, synthetic construct
KTFNRSGSPHSKAQNQQI

SEQ ID NO: 3592 - protein, 18 aa, synthetic construct
KTINGSGSPHTKAQNPPT

SEQ ID NO: 3593 - protein, 18 aa, synthetic construct
KSLNGSGSPHTKAQNQQT

SEQ ID NO: 3594 - protein, 18 aa, synthetic construct
KTENKSGSPHSKAQNQQT

SEQ ID NO: 3595 - protein, 18 aa, synthetic construct
KTDKGSGSPHSKAQNQQT

SEQ ID NO: 3596 - protein, 18 aa, synthetic construct
KTSNASGSPHSKAQHQQT

SEQ ID NO: 3597 - protein, 18 aa, synthetic construct
KTINASGSPHSKAINQQT

SEQ ID NO: 3598 - protein, 18 aa, synthetic construct
KTINGSGSPHSKAPNQQH

SEQ ID NO: 3599 - protein, 18 aa, synthetic construct
KTVNASGSPHSKAQNHQT

SEQ ID NO: 3600 - protein, 18 aa, synthetic construct
KTIDGSGSPHSKAENRQT

SEQ ID NO: 3601 - protein, 18 aa, synthetic construct
KTIKGSGSPHSKVQDQQT

SEQ ID NO: 3602 - protein, 18 aa, synthetic construct
KAINGSGSPHSKAQTQQA

SEQ ID NO: 3603 - protein, 18 aa, synthetic construct
KTEAKSGSPHSKAQNQQT

SEQ ID NO: 3604 - protein, 18 aa, synthetic construct
KTIPGSGSPHSKAQNLQT

SEQ ID NO: 3605 - protein, 18 aa, synthetic construct
KTIHGSGSPHSKAQNQAT

SEQ ID NO: 3606 - protein, 18 aa, synthetic construct
KAINGHDSPHKSGQIRQT

SEQ ID NO: 3607 - protein, 18 aa, synthetic construct
KTINGHDSPHKIGQNQHA

SEQ ID NO: 3608 - protein, 18 aa, synthetic construct
KAINGYDSPHKSGQKQQT

SEQ ID NO: 3609 - protein, 18 aa, synthetic construct
KTESGHDSPHKSGQNQQT

SEQ ID NO: 3610 - protein, 18 aa, synthetic construct
KTINGHDSPHKSGQSVQT

SEQ ID NO: 3611 - protein, 18 aa, synthetic construct
TTINGHDSPHKSGQNQQT

SEQ ID NO: 3612 - protein, 18 aa, synthetic construct
KTINGHESPHKSGRSQQT

SEQ ID NO: 3613 - protein, 18 aa, synthetic construct
KTINGHDSPHKSGQNKLE

SEQ ID NO: 3614 - protein, 18 aa, synthetic construct
KTINGHDSPHKTGQNQQK

SEQ ID NO: 3615 - protein, 18 aa, synthetic construct
KAINGHDNPHKSGQNQQT

SEQ ID NO: 3616 - protein, 18 aa, synthetic construct
KTINGQDSPHKSGQHQQA

SEQ ID NO: 3617 - protein, 18 aa, synthetic construct
KSINGHDSPHKSGQIQHT

SEQ ID NO: 3618 - protein, 18 aa, synthetic construct
KAINGHDSPHKSGPRQQT

SEQ ID NO: 3619 - protein, 18 aa, synthetic construct
KTVNGHDSPHKSGHTQQT

SEQ ID NO: 3620 - protein, 18 aa, synthetic construct
KSINGHDSPHKSGQRQHT

SEQ ID NO: 3621 - protein, 18 aa, synthetic construct
KAINGHDSPHKSAQSQQT

SEQ ID NO: 3622 - protein, 18 aa, synthetic construct
KSIYGHESPHKSGQNQQS

SEQ ID NO: 3623 - DNA, 2232 bp, synthetic construct
  source 1..2232: mol_type = other DNA
atggctgccgatggttatcttccagattggctcgaggacaaccttagtgaaggaattcgcgagtggtgggctttgaaacctggagcccctcaacccaaggcaaatcaacaacatcaagacaacgctcgaggtcttgtgcttccgggttacaaataccttggacccggcaacggactcgacaagggggagccggtcaacgcagcagacgcggcggccctcgagcacgacaaggcctacgaccagcagctcaaggccggagacaacccgtacctcaagtacaaccacgccgacgccgagttccaggagcggctcaaagaagatacgtcttttgggggcaacctcgggcgagcagtcttccaggccaaaaagaggcttcttgaacctcttggtctggttgaggaagcggctaagacggctcctggaaagaagaggcctgtagagcagtctcctcaggaaccggactcctccgcgggtattggcaaatcgggtgcacagcccgctaaaaagagactcaatttcggtcagactggcgacacagagtcagtcccagaccctcaaccaatcggagaacctcccgcagccccctcaggtgtgggatctcttacaatggcttcaggtggtggcgcaccagtggcagacaataacgaaggtgccgatggagtgggtagttcctcgggaaattggcattgcgattcccaatggctgggggacagagtcatcaccaccagcacccgaacctgggccctgcccacctacaacaatcacctctacaagcaaatctccaacagcacatctggaggatcttcaaatgacaacgcctacttcggctacagcaccccctgggggtattttgacttcaacagattccactgccacttctcaccacgtgactggcagcgactcatcaacaacaactggggattccggcctaagcgactcaacttcaagctcttcaacattcaggtcaaagaggttacggacaacaatggagtcaagaccatcgccaataaccttaccagcacggtccaggtcttcacggactcagactatcagctcccgtacgtgctcgggtcggctcacgagggctgcctcccgccgttcccagcggacgttttcatgattcctcagtacgggtatctgacgcttaatgatggaagccaggccgtgggtcgttcgtccttttactgcctggaatatttcccgtcgcaaatgctaagaacgggtaacaacttccagttcagctacgagtttgagaacgtacctttccatagcagctacgctcacagccaaagcctggaccgactaatgaatccactcatcgaccaatacttgtactatctctcaaagactattaacggttctggacagaatcaacaaacgctaaaattcagtgtggccggacccagcaacatggctgtccagggaagaaactacatacctggacccagctaccgacaacaacgtgtctcaaccactgtgactcaaaacaacaacagcgaatttgcttggcctggagcttcttcttgggctctcaatggacgtaatagcttgatgaatcctggacctgctatggccagccacaaagaaggagaggaccgtttctttcctttgtctggatctttaatttttggcaaacaaggaactggaagagacaacgtggatgcggacaaagtcatgataaccaacgaagaagaaattaaaactactaacccggtagcaacggagtcctatggacaagtggccacaaaccaccagagtccgcttaatggtgccgtccatctttatgctcaggcgcagaccggctgggttcaaaaccaaggaatacttccgggtatggtttggcaggacagagatgtgtacctgcaaggacccatttgggccaaaattcctcacacggacggcaactttcacccttctccgctgatgggagggtttggaatgaagcacccgcctcctcagatcctcatcaaaaacacacctgtacctgccgatcctccaacggccttcaacaaggacaagctgaactctttcatcacccagtattctactggccaagtcagcgtggagatcgagtgggagctgcagaaggaaaacagcaagcggtggaacccggagatccagtacacttccaactattacaagtctaataatgttgaatttgctgttaatactgaaggtgtatatagtgaaccccgccccattggcaccagatacctgactcgtaatctgtaa

SEQ ID NO: 3624 - protein, 18 aa, synthetic construct
KTSNGYDSPHKSGQKQQT

SEQ ID NO: 3625 - protein, 18 aa, synthetic construct
KTVNGHDSPHKSGRNQET

SEQ ID NO: 3626 - protein, 18 aa, synthetic construct
KTTNGHDSPHKSGQTQLT

SEQ ID NO: 3627 - protein, 18 aa, synthetic construct
KAINGHDSPHKSEKNQQT

SEQ ID NO: 3628 - protein, 18 aa, synthetic construct
KIINGRDSPHKSGQDQQT

SEQ ID NO: 3629 - protein, 18 aa, synthetic construct
KTISGHDSPHKTGHNQQT

SEQ ID NO: 3630 - protein, 18 aa, synthetic construct
KTVNAHDSPHKSGQNQLT

SEQ ID NO: 3631 - protein, 18 aa, synthetic construct
KSINGYDSPHKSGQTQQT

SEQ ID NO: 3632 - protein, 18 aa, synthetic construct
KTINGHESPHKSGQTQQI

SEQ ID NO: 3633 - protein, 18 aa, synthetic construct
KTINGHDSPHKSGQSKQA

SEQ ID NO: 3634 - protein, 18 aa, synthetic construct
KAIIGHESPHKSGQNQQT

SEQ ID NO: 3635 - protein, 18 aa, synthetic construct
KTINGHDSPHKTGQNQPP

SEQ ID NO: 3636 - protein, 743 aa, synthetic construct
MAADGYLPDWLEDNLSEGIREWWALKPGAPQPKANQQHQDNARGLVLPGYKYLGPGNGLDKGEPVNAADAAALEHDKAYDQQLKAGDNPYLKYNHADAEFQERLKEDTSFGGNLGRAVFQAKKRLLEPLGLVEEAAKTAPGKKRPVEQSPQEPDSSAGIGKSGAQPAKKRLNFGQTGDTESVPDPQPIGEPPAAPSGVGSLTMASGGGAPVADNNEGADGVGSSSGNWHCDSQWLGDRVITTSTRTWALPTYNNHLYKQISNSTSGGSSNDNAYFGYSTPWGYFDFNRFHCHFSPRDWQRLINNNWGFRPKRLNFKLFNIQVKEVTDNNGVKTIANNLTSTVQVFTDSDYQLPYVLGSAHEGCLPPFPADVFMIPQYGYLTLNDGSQAVGRSSFYCLEYFPSQMLRTGNNFQFSYEFENVPFHSSYAHSQSLDRLMNPLIDQYLYYLSKTINGSGQNQQTLKFSVAGPSNMAVQGRNYIPGPSYRQQRVSTTVTQNNNSEFAWPGASSWALNGRNSLMNPGPAMASHKEGEDRFFPLSGSLIFGKQGTGRDNVDADKVMITNEEEIKTTNPVATESYGQVATNHQSPLNGAVHLYAQAQTGWVQNQGILPGMVWQDRDVYLQGPIWAKIPHTDGNFHPSPLMGGFGMKHPPPQILIKNTPVPADPPTAFNKDKLNSFITQYSTGQVSVEIEWELQKENSKRWNPEIQYTSNYYKSNNVEFAVNTEGVYSEPRPIGTRYLTRNL

SEQ ID NO: 3637 - protein, 18 aa, synthetic construct
KTIKGNDSPHKSVQNQQT

SEQ ID NO: 3638 - protein, 18 aa, synthetic construct
KTEFGHDSPHKSGQNQQT

SEQ ID NO: 3639 - protein, 18 aa, synthetic construct
KTINGHDSPHKSAQNYQT

SEQ ID NO: 3640 - protein, 18 aa, synthetic construct
KTINAHDSPHKIGQNHQT

SEQ ID NO: 3641 - protein, 18 aa, synthetic construct
KTINGHESPHKSAQNRQT

SEQ ID NO: 3642 - protein, 18 aa, synthetic construct
KTTNGHDSPHKSGQNQQG

SEQ ID NO: 3643 - protein, 18 aa, synthetic construct
KTIKGQDSPHKIGQNQQT

SEQ ID NO: 3644 - protein, 18 aa, synthetic construct
KTVNGHDSPHKSGQNHLT

SEQ ID NO: 3645 - protein, 18 aa, synthetic construct
KSINGHDSPHKSGQYQHT

SEQ ID NO: 3646 - protein, 18 aa, synthetic construct
KTINGNDSPHKSVQNHQT

SEQ ID NO: 3647 - protein, 18 aa, synthetic construct
KTITGHDSPHKSGQNQWT

SEQ ID NO: 3648 - protein, 18 aa, synthetic construct
KTNNGHDSPHKSVQNQHT

SEQ ID NO: 3649 - protein, 18 aa, synthetic construct
KTIDGHDSPHKSGQNQHA

SEQ ID NO: 3650 - protein, 18 aa, synthetic construct
KTVNGHDSPHKSGQTRQT

SEQ ID NO: 3651 - protein, 18 aa, synthetic construct
KTVNGHDSPHKSGQNLHT

SEQ ID NO: 3652 - protein, 18 aa, synthetic construct
KAISGHDSPHKSGLNQQT

SEQ ID NO: 3653 - protein, 18 aa, synthetic construct
KAINGHDSPHKSAQNQET

SEQ ID NO: 3654 - protein, 18 aa, synthetic construct
KTITGHDSPHKSGQHLQT

SEQ ID NO: 3655 - protein, 18 aa, synthetic construct
KTINGHDSPHKSRLNQPT

SEQ ID NO: 3656 - protein, 18 aa, synthetic construct
KTVDGHDSPHKSGQKQQT

SEQ ID NO: 3657 - protein, 18 aa, synthetic construct
KTINGQDSPHKSGQNQDT

SEQ ID NO: 3658 - protein, 18 aa, synthetic construct
KTIEGHDSPHKSGRNQQT

SEQ ID NO: 3659 - protein, 18 aa, synthetic construct
KTTNGHDSPHKSGQNLLT

SEQ ID NO: 3660 - protein, 18 aa, synthetic construct
KTINGHDSPHKSGQLVIT

SEQ ID NO: 3661 - protein, 18 aa, synthetic construct
KTVNGHDSPHKSRQSQQT

SEQ ID NO: 3662 - protein, 18 aa, synthetic construct
KTINGHDSPHKSGRTQET

SEQ ID NO: 3663 - protein, 18 aa, synthetic construct
KTINGHDSPHKSVQTHQT

SEQ ID NO: 3664 - protein, 18 aa, synthetic construct
KTSNGHDSPHKSGQNQPA

SEQ ID NO: 3665 - protein, 18 aa, synthetic construct
KTEGKHDSPHKSGQNQQT

SEQ ID NO: 3666 - protein, 18 aa, synthetic construct
KVINGHDSPHKSGQTQQT

SEQ ID NO: 3667 - protein, 18 aa, synthetic construct
KTINGPDSPHKIGQNQQS

SEQ ID NO: 3668 - protein, 18 aa, synthetic construct
KAVNGHDSPHKSVQNQQT

SEQ ID NO: 3669 - protein, 18 aa, synthetic construct
KTINGHDSPHKSRQDQHT

SEQ ID NO: 3670 - protein, 18 aa, synthetic construct
KAINGPDSPHKSGQKQQT

SEQ ID NO: 3671 - protein, 18 aa, synthetic construct
KTINGHDSPHKSRQSQHT

SEQ ID NO: 3672 - protein, 18 aa, synthetic construct
KTIYGHDSPHKSVQNQLT

SEQ ID NO: 3673 - protein, 18 aa, synthetic construct
KTVNGHDSPHKSGQNLLT

SEQ ID NO: 3674 - protein, 18 aa, synthetic construct
KTESAHDSPHKSGQNQQT

SEQ ID NO: 3675 - protein, 18 aa, synthetic construct
KTTNGQDSPHKSGQNQQS

SEQ ID NO: 3676 - protein, 18 aa, synthetic construct
KTIDGHDSPHKSGRNQQI

SEQ ID NO: 3677 - protein, 18 aa, synthetic construct
KTINGYDSPHKSGQYQHT

SEQ ID NO: 3678 - protein, 18 aa, synthetic construct
KTDNGHDSPHKSRQNQQT

SEQ ID NO: 3679 - protein, 18 aa, synthetic construct
KTINGHDSPHKSWVRQQT

SEQ ID NO: 3680 - protein, 18 aa, synthetic construct
KTINGHESPHKSGQNQHS

SEQ ID NO: 3681 - protein, 18 aa, synthetic construct
KTVNGHDSPHKIGHNQQT

SEQ ID NO: 3682 - protein, 18 aa, synthetic construct
KTCNGHDSPHKSGRNQQT

SEQ ID NO: 3683 - protein, 18 aa, synthetic construct
KNVVGHDSPHKSGQNQQT

SEQ ID NO: 3684 - protein, 18 aa, synthetic construct
KTELWHDSPHKSGQNQQT

SEQ ID NO: 3685 - protein, 18 aa, synthetic construct
KTELRHDSPHKSGQNQQT

SEQ ID NO: 3686 - protein, 18 aa, synthetic construct
KTINGHDSPHKSNAWQQT

SEQ ID NO: 3687 - protein, 18 aa, synthetic construct
KTDAGHDSPHKSGQNQQT

SEQ ID NO: 3688 - protein, 18 aa, synthetic construct
KTEVGHDSPHKSGQNQQT

SEQ ID NO: 3689 - protein, 18 aa, synthetic construct
KTESRHDSPHKSGQNQQT

SEQ ID NO: 3690 - protein, 18 aa, synthetic construct
KSELGHDSPHKSGQNQQT

SEQ ID NO: 3691 - protein, 18 aa, synthetic construct
KTINGHDSPHKSGQSVPT

SEQ ID NO: 3692 - protein, 18 aa, synthetic construct
KTINGHESPHKSGQNIQP

SEQ ID NO: 3693 - protein, 18 aa, synthetic construct
KTEMKHDSPHKSGQNQQT

SEQ ID NO: 3694 - protein, 18 aa, synthetic construct
KTINGHDSPHKSVQNHLN

SEQ ID NO: 3695 - protein, 18 aa, synthetic construct
KTINGHDSPHKIGLDQQT

SEQ ID NO: 3696 - protein, 18 aa, synthetic construct
KTINGHDSPHKRGPDQQS

SEQ ID NO: 3697 - protein, 18 aa, synthetic construct
KTIKGHDSPHKSGESQQT

SEQ ID NO: 3698 - protein, 18 aa, synthetic construct
KTEGWHDSPHKSGQNQQT

SEQ ID NO: 3699 - protein, 18 aa, synthetic construct
KTINGHDSPHKHGQNHQT

SEQ ID NO: 3700 - protein, 18 aa, synthetic construct
KTEQLHDSPHKSGQNQQT

SEQ ID NO: 3701 - protein, 18 aa, synthetic construct
KTIIGHDSPHKSGQYQHT

SEQ ID NO: 3702 - protein, 18 aa, synthetic construct
KTSNGHDSPHKSVQNKQT

SEQ ID NO: 3703 - protein, 18 aa, synthetic construct
KIVNGQVSPHKSGQNQQT

SEQ ID NO: 3704 - protein, 18 aa, synthetic construct
KTVNGHDSPHKSGQRQLT

SEQ ID NO: 3705 - protein, 18 aa, synthetic construct
KTVNGHDSPHKIGQNQLT

SEQ ID NO: 3706 - protein, 18 aa, synthetic construct
KTINGHDSPHKSGQIIVT

SEQ ID NO: 3707 - protein, 18 aa, synthetic construct
KTEKIHDSPHKSGQNQQT

SEQ ID NO: 3708 - protein, 18 aa, synthetic construct
KTENAHDSPHKSGQNQQT

SEQ ID NO: 3709 - protein, 18 aa, synthetic construct
KIGNGHESPHKSGQNQQT

SEQ ID NO: 3710 - protein, 18 aa, synthetic construct
KEVMGHDSPHKSGQNQQT

SEQ ID NO: 3711 - protein, 18 aa, synthetic construct
KTEVKHDSPHKSGQNQQT

SEQ ID NO: 3712 - protein, 18 aa, synthetic construct
KTINGYDSPHKSGQKQST

SEQ ID NO: 3713 - protein, 18 aa, synthetic construct
KYQVGHDSPHKSGQNQQT

SEQ ID NO: 3714 - protein, 18 aa, synthetic construct
KTEAMHDSPHKSGQNQQT

SEQ ID NO: 3715 - protein, 18 aa, synthetic construct
KTIKGDDSPHKSVQNQQT

SEQ ID NO: 3716 - protein, 18 aa, synthetic construct
KTINGHDSPHKSVQSHQT

SEQ ID NO: 3717 - protein, 18 aa, synthetic construct
KTINGHDSPHKSGQFVVT

SEQ ID NO: 3718 - protein, 18 aa, synthetic construct
KTVNGHDSPHKSRQNLQT

SEQ ID NO: 3719 - protein, 18 aa, synthetic construct
KATNGHNSPHKSGQNQET

SEQ ID NO: 3720 - protein, 18 aa, synthetic construct
KAINGHDSPHKSAQNQQI

SEQ ID NO: 3721 - protein, 18 aa, synthetic construct
KTEHGHDSPHKSGQNQQT

SEQ ID NO: 3722 - protein, 18 aa, synthetic construct
KTVENHDSPHKSGQNQQT

SEQ ID NO: 3723 - protein, 18 aa, synthetic construct
KTIYGHDSPHKSGQSQPT

SEQ ID NO: 3724 - protein, 18 aa, synthetic construct
KTISGHESPHKSGQNEQT

SEQ ID NO: 3725 - protein, 18 aa, synthetic construct
KAIIGHDSPHKSAQNQQT

SEQ ID NO: 3726 - protein, 18 aa, synthetic construct
KAIDGHDSPHKSGQNQLT

SEQ ID NO: 3727 - protein, 18 aa, synthetic construct
KTIMGHDSPHKSVQNQQT

SEQ ID NO: 3728 - protein, 18 aa, synthetic construct
KEVGGHDSPHKSGQNQQT

SEQ ID NO: 3729 - protein, 18 aa, synthetic construct
KTINGHDSPHKSAQNLLT

SEQ ID NO: 3730 - protein, 18 aa, synthetic construct
KTEFTHDSPHKSGQNQQT

SEQ ID NO: 3731 - protein, 18 aa, synthetic construct
KSEMGHDSPHKSGQNQQT

SEQ ID NO: 3732 - protein, 18 aa, synthetic construct
KAQQGHDSPHKSGQNQQT

SEQ ID NO: 3733 - protein, 18 aa, synthetic construct
KTEVMHDSPHKSGQNQQT

SEQ ID NO: 3734 - protein, 18 aa, synthetic construct
KAINGHDSPHKSGQSLQT

SEQ ID NO: 3735 - protein, 18 aa, synthetic construct
KCGEGHDSPHKSGQNQQT

SEQ ID NO: 3736 - protein, 18 aa, synthetic construct
KTVNGHDSPHKSAQNHQT

SEQ ID NO: 3737 - protein, 18 aa, synthetic construct
KTVNGHDSPHKSGQTQLT

SEQ ID NO: 3738 - protein, 18 aa, synthetic construct
KTNNGHDSPHKSGRNRQT

SEQ ID NO: 3739 - protein, 18 aa, synthetic construct
KTCNEHDSPHKSGQNQQT

SEQ ID NO: 3740 - protein, 18 aa, synthetic construct
KTINGHDSPHKYGQNEQT

SEQ ID NO: 3741 - protein, 18 aa, synthetic construct
KASNRHDSPHKSGHNQQT

SEQ ID NO: 3742 - protein, 18 aa, synthetic construct
KTETKHDSPHKSGQNQQT

SEQ ID NO: 3743 - protein, 18 aa, synthetic construct
KSINGHDSPHKSQQNQQT

SEQ ID NO: 3744 - protein, 18 aa, synthetic construct
KTIGGHDSPHKSGQNQQI

SEQ ID NO: 3745 - protein, 18 aa, synthetic construct
KTDPQHDSPHKSGQNQQT

SEQ ID NO: 3746 - protein, 18 aa, synthetic construct
KTINRHDSPHKIVQNQQT

SEQ ID NO: 3747 - protein, 18 aa, synthetic construct
KTEQYHDSPHKSGQNQQT

SEQ ID NO: 3748 - protein, 18 aa, synthetic construct
KTINGHDSPHKSVQSKQT

SEQ ID NO: 3749 - protein, 18 aa, synthetic construct
KELVGHDSPHKSGQNQQT

SEQ ID NO: 3750 - protein, 18 aa, synthetic construct
KTENRHDSPHKSGQNQQT

SEQ ID NO: 3751 - protein, 18 aa, synthetic construct
KELMGHDSPHKSGQNQQT

SEQ ID NO: 3752 - protein, 18 aa, synthetic construct
KTINGNDSPHKIGHNQQT

SEQ ID NO: 3753 - protein, 18 aa, synthetic construct
KTEGHHDSPHKSGQNQQT

SEQ ID NO: 3754 - protein, 18 aa, synthetic construct
KTEGYHDSPHKSGQNQQT

SEQ ID NO: 3755 - protein, 18 aa, synthetic construct
KTVNGHDSPHKSGQTQQI

SEQ ID NO: 3756 - protein, 18 aa, synthetic construct
KTINGQDSPHKSGQNPLT

SEQ ID NO: 3757 - protein, 18 aa, synthetic construct
KTINGHDSPHKSGRDQKT

SEQ ID NO: 3758 - protein, 18 aa, synthetic construct
KTINGHDSPHKSVHNQQN

SEQ ID NO: 3759 - protein, 18 aa, synthetic construct
KTINGHDSPHKSGQWKRT

SEQ ID NO: 3760 - protein, 18 aa, synthetic construct
KNEIGHDSPHKSGQNQQT

SEQ ID NO: 3761 - protein, 18 aa, synthetic construct
KAINGHDSPHKSGQSQQI

SEQ ID NO: 3762 - protein, 18 aa, synthetic construct
KIINGHDSPHKSRQAQQT

SEQ ID NO: 3763 - protein, 18 aa, synthetic construct
KTPNGHDSPHKSGQNQQI

SEQ ID NO: 3764 - protein, 18 aa, synthetic construct
KITNGHDSPHKSGQTQQT

SEQ ID NO: 3765 - protein, 18 aa, synthetic construct
KTINGHDSPHKSVQNHQI

SEQ ID NO: 3766 - protein, 18 aa, synthetic construct
KTINGHDSPHKSKQNQQA

SEQ ID NO: 3767 - protein, 18 aa, synthetic construct
KTINGHDSPHKSAQNQLN

SEQ ID NO: 3768 - protein, 18 aa, synthetic construct
KTDITHDSPHKSGQNQQT

SEQ ID NO: 3769 - protein, 18 aa, synthetic construct
KTVNGHDSPHKSGQTQPT

SEQ ID NO: 3770 - protein, 18 aa, synthetic construct
KTEKFHDSPHKSGQNQQT

SEQ ID NO: 3771 - protein, 18 aa, synthetic construct
KTDQGHDSPHKSGQNQQT

SEQ ID NO: 3772 - protein, 18 aa, synthetic construct
KTINGHDSPHKLWINQQT

SEQ ID NO: 3773 - protein, 18 aa, synthetic construct
KGINGPDSPHKSGQNQQT

SEQ ID NO: 3774 - protein, 18 aa, synthetic construct
KSEIGHDSPHKSGQNQQT

SEQ ID NO: 3775 - protein, 18 aa, synthetic construct
KTINGHDSPHKSVQKQLT

SEQ ID NO: 3776 - protein, 18 aa, synthetic construct
KTVNGHDSPHKSGRNQLA

SEQ ID NO: 3777 - protein, 18 aa, synthetic construct
KTNNVHDSPHKSGQNQQS

SEQ ID NO: 3778 - protein, 18 aa, synthetic construct
KSEKGHDSPHKSGQNQQT

SEQ ID NO: 3779 - protein, 18 aa, synthetic construct
KWSAGHDSPHKSGQNQQT

SEQ ID NO: 3780 - protein, 18 aa, synthetic construct
KELAGHDSPHKSGQNQQT

SEQ ID NO: 3781 - protein, 18 aa, synthetic construct
KTINGHDSPHKMGRNQQS

SEQ ID NO: 3782 - protein, 18 aa, synthetic construct
KTDQAHDSPHKSGQNQQT

SEQ ID NO: 3783 - protein, 18 aa, synthetic construct
KTETQHDSPHKSGQNQQT

SEQ ID NO: 3784 - protein, 18 aa, synthetic construct
KTEMTHDSPHKSGQNQQT

SEQ ID NO: 3785 - protein, 18 aa, synthetic construct
KTINGHDSPHKSGISIQT

SEQ ID NO: 3786 - protein, 18 aa, synthetic construct
KTDAVHDSPHKSGQNQQT

SEQ ID NO: 3787 - protein, 18 aa, synthetic construct
KTSNGHDSPHKSVQNLQT

SEQ ID NO: 3788 - protein, 18 aa, synthetic construct
KTEKYHDSPHKSGQNQQT

SEQ ID NO: 3789 - protein, 18 aa, synthetic construct
KQTQGHDSPHKSGQNQQT

SEQ ID NO: 3790 - protein, 18 aa, synthetic construct
KTINGHDSPHKMAHNQQT

SEQ ID NO: 3791 - protein, 18 aa, synthetic construct
KTINGHDSPHKHGQNQQN

SEQ ID NO: 3792 - protein, 18 aa, synthetic construct
KGADGHDSPHKSGQNQQT

SEQ ID NO: 3793 - protein, 18 aa, synthetic construct
KVGEGHDSPHKSGQNQQT

SEQ ID NO: 3794 - protein, 18 aa, synthetic construct
KANEGHDSPHKSGQNQQT

SEQ ID NO: 3795 - protein, 18 aa, synthetic construct
KTDTMHDSPHKSGQNQQT

SEQ ID NO: 3796 - protein, 18 aa, synthetic construct
KTINGHDSPHKSVQSQQS

SEQ ID NO: 3797 - protein, 18 aa, synthetic construct
KTCIAHDSPHKSGQNQQT

SEQ ID NO: 3798 - protein, 18 aa, synthetic construct
KTINGHDSPHKSGQTVCT

SEQ ID NO: 3799 - protein, 18 aa, synthetic construct
KELRGHDSPHKSGQNQQT

SEQ ID NO: 3800 - protein, 18 aa, synthetic construct
KCQIGHDSPHKSGQNQQT

SEQ ID NO: 3801 - protein, 18 aa, synthetic construct
KGVMGHDSPHKSGQNQQT

SEQ ID NO: 3802 - protein, 18 aa, synthetic construct
KACDGHDSPHKSGQNQQT

SEQ ID NO: 3803 - protein, 18 aa, synthetic construct
KTINGQDSPHKSGQYQQI

SEQ ID NO: 3804 - protein, 18 aa, synthetic construct
KTINGHDSPHKSGQQIMT

SEQ ID NO: 3805 - protein, 18 aa, synthetic construct
KTINGHDSPHKSRQNEQS

SEQ ID NO: 3806 - protein, 18 aa, synthetic construct
KASNGHDSPHKSGLNHQT

SEQ ID NO: 3807 - protein, 18 aa, synthetic construct
KTVNGHDSPHKSGQSQPT

SEQ ID NO: 3808 - protein, 18 aa, synthetic construct
KNELGHDSPHKSGQNQQT

SEQ ID NO: 3809 - protein, 18 aa, synthetic construct
KTETFHDSPHKSGQNQQT

SEQ ID NO: 3810 - protein, 18 aa, synthetic construct
KAAEGHDSPHKSGQNQQT

SEQ ID NO: 3811 - protein, 18 aa, synthetic construct
KGQNGHDSPHKSGQNQQT

SEQ ID NO: 3812 - protein, 18 aa, synthetic construct
KNEFGHDSPHKSGQNQQT

SEQ ID NO: 3813 - protein, 18 aa, synthetic construct
KTSIGYDSPHKSGQNQQT

SEQ ID NO: 3814 - protein, 18 aa, synthetic construct
KTDNGHDSPHKSGQNLQT

SEQ ID NO: 3815 - protein, 18 aa, synthetic construct
KTEGQHDSPHKSGQNQQT

SEQ ID NO: 3816 - protein, 18 aa, synthetic construct
KTITGHDSPHKSRQDQQT

SEQ ID NO: 3817 - protein, 18 aa, synthetic construct
KAEHGHDSPHKSGQNQQT

SEQ ID NO: 3818 - protein, 18 aa, synthetic construct
KTINGDDSPHKSGQKQLT

SEQ ID NO: 3819 - protein, 18 aa, synthetic construct
KCDQGHDSPHKSGQNQQT

SEQ ID NO: 3820 - protein, 18 aa, synthetic construct
KEILGHDSPHKSGQNQQT

SEQ ID NO: 3821 - protein, 18 aa, synthetic construct
KTERNHDSPHKSGQNQQT

SEQ ID NO: 3822 - protein, 18 aa, synthetic construct
KAINGDDSPHKSGHNQQT

SEQ ID NO: 3823 - protein, 18 aa, synthetic construct
KTSNGHNSPHKSGQNQET

SEQ ID NO: 3824 - protein, 18 aa, synthetic construct
KTINGHDSPHKSGQMIHT

SEQ ID NO: 3825 - protein, 18 aa, synthetic construct
KNAIGHDSPHKSGQNQQT

SEQ ID NO: 3826 - protein, 18 aa, synthetic construct
KTDKFHDSPHKSGQNQQT

SEQ ID NO: 3827 - protein, 18 aa, synthetic construct
KTEGFHDSPHKSGQNQQT

SEQ ID NO: 3828 - protein, 18 aa, synthetic construct
KVINGHDSPHKSGRNHQS

SEQ ID NO: 3829 - protein, 18 aa, synthetic construct
KTITGHDSPHKSVQNRQT

SEQ ID NO: 3830 - protein, 18 aa, synthetic construct
KTPDMHDSPHKSGQNQQT

SEQ ID NO: 3831 - protein, 18 aa, synthetic construct
KTINGHDSPHKSGQKMNT

SEQ ID NO: 3832 - protein, 18 aa, synthetic construct
KTELQHDSPHKSGQNQQT

SEQ ID NO: 3833 - protein, 18 aa, synthetic construct
KTIHGHDSPHKSGQSQQN

SEQ ID NO: 3834 - protein, 18 aa, synthetic construct
KTEIGHDSPHKSGQNQQT

SEQ ID NO: 3835 - protein, 18 aa, synthetic construct
KTINGHDSPHKSGQYQHA

SEQ ID NO: 3836 - protein, 18 aa, synthetic construct
KTELYHDSPHKSGQNQQT

SEQ ID NO: 3837 - protein, 18 aa, synthetic construct
KTINGRGSPHKRGQNQQT

SEQ ID NO: 3838 - protein, 18 aa, synthetic construct
KTINGHGSPHSKAQNPQT

SEQ ID NO: 3839 - protein, 18 aa, synthetic construct
KTFNGSASPHSKALNQQT

SEQ ID NO: 3840 - protein, 18 aa, synthetic construct
KTINGCGSPHASGQNQQT

SEQ ID NO: 3841 - protein, 18 aa, synthetic construct
KTINGNGSPHSKAQNHQA

SEQ ID NO: 3842 - protein, 18 aa, synthetic construct
KTINGMGSPHSKTQNQQT

SEQ ID NO: 3843 - protein, 18 aa, synthetic construct
KTVNGTGSPHSKAQNQLT

SEQ ID NO: 3844 - protein, 18 aa, synthetic construct
KTIHGNGSPHSKAQNQET

SEQ ID NO: 3845 - protein, 18 aa, synthetic construct
KAINGNGSPHKRGQNQQT

SEQ ID NO: 3846 - protein, 18 aa, synthetic construct
KTINGNGSPHSKAPNLQT

SEQ ID NO: 3847 - protein, 18 aa, synthetic construct
KTIKGGGSPHSKAQDQQT

SEQ ID NO: 3848 - protein, 18 aa, synthetic construct
KTINGHPSPHWKGQNQQT

SEQ ID NO: 3849 - protein, 4 aa, synthetic construct
QRTC

SEQ ID NO: 3850 - protein, 4 aa, synthetic construct
QIGH

SEQ ID NO: 3851 - protein, 4 aa, synthetic construct
QGAI

SEQ ID NO: 3852 - protein, 4 aa, synthetic construct
QVPP

SEQ ID NO: 3853 - protein, 4 aa, synthetic construct
QVQQ

SEQ ID NO: 3854 - protein, 4 aa, synthetic construct
LMRQ

SEQ ID NO: 3855 - protein, 4 aa, synthetic construct
QYSV

SEQ ID NO: 3856 - protein, 4 aa, synthetic construct
QAIT

SEQ ID NO: 3857 - protein, 4 aa, synthetic construct
QKTL

SEQ ID NO: 3858 - protein, 4 aa, synthetic construct
QLHH

SEQ ID NO: 3859 - protein, 4 aa, synthetic construct
QNII

SEQ ID NO: 3860 - protein, 4 aa, synthetic construct
QGHH

SEQ ID NO: 3861 - protein, 4 aa, synthetic construct
QSKV

SEQ ID NO: 3862 - protein, 4 aa, synthetic construct
QLPS

SEQ ID NO: 3863 - protein, 4 aa, synthetic construct
IGKQ

SEQ ID NO: 3864 - protein, 4 aa, synthetic construct
QAIH

SEQ ID NO: 3865 - protein, 4 aa, synthetic construct
QHGL

SEQ ID NO: 3866 - protein, 4 aa, synthetic construct
QFMC

SEQ ID NO: 3867 - protein, 4 aa, synthetic construct
QNQM

SEQ ID NO: 3868 - protein, 4 aa, synthetic construct
QHLQ

SEQ ID NO: 3869 - protein, 4 aa, synthetic construct
QPAR

SEQ ID NO: 3870 - protein, 4 aa, synthetic construct
QSLQ

SEQ ID NO: 3871 - protein, 4 aa, synthetic construct
QSQL

SEQ ID NO: 3872 - protein, 4 aa, synthetic construct
HSQQ

SEQ ID NO: 3873 - protein, 4 aa, synthetic construct
QMPS

SEQ ID NO: 3874 - protein, 4 aa, synthetic construct
QGSL

SEQ ID NO: 3875 - protein, 4 aa, synthetic construct
QVPA

SEQ ID NO: 3876 - protein, 4 aa, synthetic construct
HYQQ

SEQ ID NO: 3877 - protein, 4 aa, synthetic construct
QVPS

SEQ ID NO: 3878 - protein, 4 aa, synthetic construct
RGEQ

SEQ ID NO: 3879 - protein, 4 aa, synthetic construct
PGQQ

SEQ ID NO: 3880 - protein, 4 aa, synthetic construct
LEQQ

SEQ ID NO: 3881 - protein, 4 aa, synthetic construct
QNQS

SEQ ID NO: 3882 - protein, 4 aa, synthetic construct
QKVI

SEQ ID NO: 3883 - protein, 4 aa, synthetic construct
QNND

SEQ ID NO: 3884 - protein, 4 aa, synthetic construct
QSVH

SEQ ID NO: 3885 - protein, 4 aa, synthetic construct
QPLG

SEQ ID NO: 3886 - protein, 4 aa, synthetic construct
HNQE

SEQ ID NO: 3887 - protein, 4 aa, synthetic construct
QIQQ

SEQ ID NO: 3888 - protein, 4 aa, synthetic construct
QVRN

SEQ ID NO: 3889 - protein, 4 aa, synthetic construct
PSNQ

SEQ ID NO: 3890 - protein, 4 aa, synthetic construct
QVGH

SEQ ID NO: 3891 - protein, 4 aa, synthetic construct
QRDI

SEQ ID NO: 3892 - protein, 4 aa, synthetic construct
QMPN

SEQ ID NO: 3893 - protein, 4 aa, synthetic construct
RGLQ

SEQ ID NO: 3894 - protein, 4 aa, synthetic construct
PSLQ

SEQ ID NO: 3895 - protein, 4 aa, synthetic construct
QRDQ

SEQ ID NO: 3896 - protein, 4 aa, synthetic construct
QAKG

SEQ ID NO: 3897 - protein, 4 aa, synthetic construct
QSAH

SEQ ID NO: 3898 - protein, 4 aa, synthetic construct
QSTM

SEQ ID NO: 3899 - protein, 4 aa, synthetic construct
QREM

SEQ ID NO: 3900 - protein, 4 aa, synthetic construct
QYRA

SEQ ID NO: 3901 - protein, 4 aa, synthetic construct
QRQQ

SEQ ID NO: 3902 - protein, 4 aa, synthetic construct
QWQQ

SEQ ID NO: 3903 - protein, 4 aa, synthetic construct
QRMN

SEQ ID NO: 3904 - protein, 4 aa, synthetic construct
GDSQ

SEQ ID NO: 3905 - protein, 4 aa, synthetic construct
QKIS

SEQ ID NO: 3906 - protein, 4 aa, synthetic construct
PSMQ

SEQ ID NO: 3907 - protein, 4 aa, synthetic construct
SPRQ

SEQ ID NO: 3908 - protein, 4 aa, synthetic construct
MEQQ

SEQ ID NO: 3909 - protein, 4 aa, synthetic construct
QYQN

SEQ ID NO: 3910 - protein, 4 aa, synthetic construct
QIRQ

SEQ ID NO: 3911 - protein, 4 aa, synthetic construct
QSVQ

SEQ ID NO: 3912 - protein, 4 aa, synthetic construct
RSQQ

SEQ ID NO: 3913 - protein, 4 aa, synthetic construct
QNKL

SEQ ID NO: 3914 - protein, 4 aa, synthetic construct
QIQH

SEQ ID NO: 3915 - protein, 4 aa, synthetic construct
PRQQ

SEQ ID NO: 3916 - protein, 4 aa, synthetic construct
HTQQ

SEQ ID NO: 3917 - protein, 4 aa, synthetic construct
QRQH

SEQ ID NO: 3918 - protein, 4 aa, synthetic construct
RNQE

SEQ ID NO: 3919 - protein, 4 aa, synthetic construct
QSKQ

SEQ ID NO: 3920 - protein, 4 aa, synthetic construct
QNQP

SEQ ID NO: 3921 - protein, 4 aa, synthetic construct
QSPQ

SEQ ID NO: 3922 - protein, 4 aa, synthetic construct
QTRQ

SEQ ID NO: 3923 - protein, 4 aa, synthetic construct
QNLH

SEQ ID NO: 3924 - protein, 4 aa, synthetic construct
QNQE

SEQ ID NO: 3925 - protein, 4 aa, synthetic construct
LNQP

SEQ ID NO: 3926 - protein, 4 aa, synthetic construct
QNQD

SEQ ID NO: 3927 - protein, 4 aa, synthetic construct
QNLL

SEQ ID NO: 3928 - protein, 4 aa, synthetic construct
QLVI

SEQ ID NO: 3929 - protein, 4 aa, synthetic construct
RTQE

SEQ ID NO: 3930 - protein, 4 aa, synthetic construct
QTHQ

SEQ ID NO: 3931 - protein, 4 aa, synthetic construct
QDQH

SEQ ID NO: 3932 - protein, 4 aa, synthetic construct
QSQH

SEQ ID NO: 3933 - protein, 4 aa, synthetic construct
VRQQ

SEQ ID NO: 3934 - protein, 4 aa, synthetic construct
AWQQ

SEQ ID NO: 3935 - protein, 4 aa, synthetic construct
QSVP

SEQ ID NO: 3936 - protein, 4 aa, synthetic construct
QNIQ

SEQ ID NO: 3937 - protein, 4 aa, synthetic construct
LDQQ

SEQ ID NO: 3938 - protein, 4 aa, synthetic construct
PDQQ

SEQ ID NO: 3939 - protein, 4 aa, synthetic construct
ESQQ

SEQ ID NO: 3940 - protein, 4 aa, synthetic construct
QRQL

SEQ ID NO: 3941 - protein, 4 aa, synthetic construct
QIIV

SEQ ID NO: 3942 - protein, 4 aa, synthetic construct
QKQS

SEQ ID NO: 3943 - protein, 4 aa, synthetic construct
QSHQ

SEQ ID NO: 3944 - protein, 4 aa, synthetic construct
QFVV

SEQ ID NO: 3945 - protein, 4 aa, synthetic construct
QSQP

SEQ ID NO: 3946 - protein, 4 aa, synthetic construct
QNEQ

SEQ ID NO: 3947 - protein, 4 aa, synthetic construct
INQQ

SEQ ID NO: 3948 - protein, 4 aa, synthetic construct
RNRQ

SEQ ID NO: 3949 - protein, 4 aa, synthetic construct
RDQK

SEQ ID NO: 3950 - protein, 4 aa, synthetic construct
QWKR

SEQ ID NO: 3951 - protein, 4 aa, synthetic construct
ENRQ

SEQ ID NO: 3952 - protein, 4 aa, synthetic construct
QTQP

SEQ ID NO: 3953 - protein, 4 aa, synthetic construct
QKQL

SEQ ID NO: 3954 - protein, 4 aa, synthetic construct
RNQL

SEQ ID NO: 3955 - protein, 4 aa, synthetic construct
ISIQ

SEQ ID NO: 3956 - protein, 4 aa, synthetic construct
QTVC

SEQ ID NO: 3957 - protein, 4 aa, synthetic construct
QQIM

SEQ ID NO: 3958 - protein, 4 aa, synthetic construct
LNHQ

SEQ ID NO: 3959 - protein, 4 aa, synthetic construct
QNQA

SEQ ID NO: 3960 - protein, 4 aa, synthetic construct
QMIH

SEQ ID NO: 3961 - protein, 4 aa, synthetic construct
RNHQ

SEQ ID NO: 3962 - protein, 4 aa, synthetic construct
QKMN

SEQ ID NO: 3963 - protein, 9 aa, synthetic construct
  VARIANT 1: note = Any amino acid
  VARIANT 7: note = Any amino acid
  VARIANT 9: note = Any amino acid
XSGSPHXKX

SEQ ID NO: 3964 - protein, 5 aa, synthetic construct
QNQQT

SEQ ID NO: 3965 - protein, 5 aa, synthetic construct
QNRHT

SEQ ID NO: 3966 - protein, 5 aa, synthetic construct
RDQQT

SEQ ID NO: 3967 - protein, 5 aa, synthetic construct
PNLQT

SEQ ID NO: 3968 - protein, 5 aa, synthetic construct
HVRQT

SEQ ID NO: 3969 - protein, 5 aa, synthetic construct
PNQHT

SEQ ID NO: 3970 - protein, 5 aa, synthetic construct
QSQQT

SEQ ID NO: 3971 - protein, 5 aa, synthetic construct
QNQQI

SEQ ID NO: 3972 - protein, 5 aa, synthetic construct
QPAKT

SEQ ID NO: 3973 - protein, 5 aa, synthetic construct
QTQQN

SEQ ID NO: 3974 - protein, 5 aa, synthetic construct
QNLAT

SEQ ID NO: 3975 - protein, 5 aa, synthetic construct
QNQLT

SEQ ID NO: 3976 - protein, 5 aa, synthetic construct
QGQQT

SEQ ID NO: 3977 - protein, 5 aa, synthetic construct
LNRQS

SEQ ID NO: 3978 - protein, 5 aa, synthetic construct
HNQQT

SEQ ID NO: 3979 - protein, 5 aa, synthetic construct
QNPPT

SEQ ID NO: 3980 - protein, 5 aa, synthetic construct
QNLQT

SEQ ID NO: 3981 - protein, 5 aa, synthetic construct
QYQQT

SEQ ID NO: 3982 - protein, 5 aa, synthetic construct
QDQET

SEQ ID NO: 3983 - protein, 5 aa, synthetic construct
QNHQT

SEQ ID NO: 3984 - protein, 5 aa, synthetic construct
QDQQT

SEQ ID NO: 3985 - protein, 5 aa, synthetic construct
HWQQT

SEQ ID NO: 3986 - protein, 5 aa, synthetic construct
PNQQT

SEQ ID NO: 3987 - protein, 5 aa, synthetic construct
QNQLI

SEQ ID NO: 3988 - protein, 5 aa, synthetic construct
PEQQT

SEQ ID NO: 3989 - protein, 5 aa, synthetic construct
QRTMT

SEQ ID NO: 3990 - protein, 5 aa, synthetic construct
QNQQH

SEQ ID NO: 3991 - protein, 5 aa, synthetic construct
LHQHT

SEQ ID NO: 3992 - protein, 5 aa, synthetic construct
QHRIT

SEQ ID NO: 3993 - protein, 5 aa, synthetic construct
QYIHT

SEQ ID NO: 3994 - protein, 5 aa, synthetic construct
QKFET

SEQ ID NO: 3995 - protein, 5 aa, synthetic construct
QFPST

SEQ ID NO: 3996 - protein, 5 aa, synthetic construct
HNQQR

SEQ ID NO: 3997 - protein, 5 aa, synthetic construct
QAIKT

SEQ ID NO: 3998 - protein, 5 aa, synthetic construct
QNRQT

SEQ ID NO: 3999 - protein, 5 aa, synthetic construct
QYQHT

SEQ ID NO: 4000 - DNA, 1184 bp, synthetic construct
  source 1..1184: mol_type = other DNA
cgtgaggctccggtgcccgtcagtgggcagagcgcacatcgcccacagtccccgagaagttggggggaggggtcggcaattgaaccggtgcctagagaaggtggcgcggggtaaactgggaaagtgatgtcgtgtactggctccgcctttttcccgagggtgggggagaaccgtatataagtgcagtagtcgccgtgaacgttctttttcgcaacgggtttgccgccagaacacaggtaagtgccgtgtgtggttcccgcgggcctggcctctttacgggttatggcccttgcgtgccttgaattacttccacctggctgcagtacgtgattcttgatcccgagcttcgggttggaagtgggtgggagagttcgaggccttgcgcttaaggagccccttcgcctcgtgcttgagttgaggcctggcctgggcgctggggccgccgcgtgcgaatctggtggcaccttcgcgcctgtctcgctgctttcgataagtctctagccatttaaaatttttgatgacctgctgcgacgctttttttctggcaagatagtcttgtaaatgcgggccaagatctgcacactggtatttcggtttttggggccgcgggcggcgacggggcccgtgcgtcccagcgcacatgttcggcgaggcggggcctgcgagcgcggccaccgagaatcggacgggggtagtctcaagctggccggcctgctctggtgcctggcctcgcgccgccgtgtatcgccccgccctgggcggcaaggctggcccggtcggcaccagttgcgtgagcggaaagatggccgcttcccggccctgctgcagggagctcaaaatggaggacgcggcgctcgggagagcgggcgggtgagtcacccacacaaaggaaaagggcctttccgtcctcagccgtcgcttcatgtgactccacggagtaccgggcgccgtccaggcacctcgattagttctcgagcttttggagtacgtcgtctttaggttggggggaggggttttatgcgatggagtttccccacactgagtgggtggagactgaagttaggccagcttggcacttgatgtaattctccttggaatttgccctttttgagtttggatcttggttcattctcaagcctcagacagtggttcaaagtttttttcttccatttcaggtgtcgtga

SEQ ID NO: 4001 - DNA, 227 bp, synthetic construct
  source 1..227: mol_type = other DNA
gcccgtcagtgggcagagcgcacatcgcccacagtccccgagaagttggggggaggggtcggcaattgaaccggtgcctagagaaggtggcgcggggtaaactgggaaagtgatgtcgtgtactggctccgcctttttcccgagggtgggggagaaccgtatataagtgcagtagtcgccgtgaacgttctttttcgcaacgggtttgccgccagaacacgcgtaag

SEQ ID NO: 4002 - protein, 5 aa, synthetic construct
QNPQS

SEQ ID NO: 4003 - DNA, 16 bp, synthetic construct
  source 1..16: mol_type = other DNA
ggtggagaagagcatg

SEQ ID NO: 4004 - DNA, 27 bp, synthetic construct
  source 1..27: mol_type = other DNA
gtcatcactgaggtggagaagagcatg

SEQ ID NO: 4005 - protein, 5 aa, synthetic construct
QHQLT

SEQ ID NO: 4006 - protein, 5 aa, synthetic construct
QSPPT

SEQ ID NO: 4007 - protein, 5 aa, synthetic construct
QAKLT

SEQ ID NO: 4008 - DNA, 222 bp, synthetic construct
  source 1..222: mol_type = other DNA
gcccgtcagtgggcagagcgcacatcgcccacagtccccgagaagttggggggaggggtcggcaattgaaccggtgcctagagaaggtggcgcggggtaaactgggaaagtgatgtcgtgtactggctccgcctttttcccgagggtgggggagaaccgtatataagtgcagtagtcgccgtgaacgttctttttcgcaacgggtttgccgccagaacacag

SEQ ID NO: 4009 - DNA, 222 bp, synthetic construct
  source 1..222: mol_type = other DNA
gcccgtcagtgggcagagcgcacatcgcccacagtccccgagaagttggggggaggggtcggcaattgaaccggtgcctagagaaggtggcgcggggtaaactgggaaagtgatgtcgtgtactggctccgcctttttcccgagggtgggggagaaccgtatataagtgcagtagtcgccgtgaacgttctttttcgcaacgggtttgccgccagaacacgc

SEQ ID NO: 4010 - protein, 5 aa, synthetic construct
KSQQT

SEQ ID NO: 4011 - DNA, 229 bp, synthetic construct
  source 1..229: mol_type = other DNA
gtgcccgtcagtgggcagagcgcacatcgcccacagtccccgagaagttggggggaggggtcggcaattgaaccggtgcctagagaaggtggcgcggggtaaactgggaaagtgatgtcgtgtactggctccgcctttttcccgagggtgggggagaaccgtatataagtgcagtagtcgccgtgaacgttctttttcgcaacgggtttgccgccagaacacgcgtaag

SEQ ID NO: 4012 - DNA, 235 bp, synthetic construct
  source 1..235: mol_type = other DNA
gctccggtgcccgtcagtgggcagagcgcacatcgcccacagtccccgagaagttggggggaggggtcggcaattgaaccggtgcctagagaaggtggcgcggggtaaactgggaaagtgatgtcgtgtactggctccgcctttttcccgagggtgggggagaaccgtatataagtgcagtagtcgccgtgaacgttctttttcgcaacgggtttgccgccagaacacgcgtaag

SEQ ID NO: 4013 - DNA, 241 bp, synthetic construct
  source 1..241: mol_type = other DNA
cgtgaggctccggtgcccgtcagtgggcagagcgcacatcgcccacagtccccgagaagttggggggaggggtcggcaattgaaccggtgcctagagaaggtggcgcggggtaaactgggaaagtgatgtcgtgtactggctccgcctttttcccgagggtgggggagaaccgtatataagtgcagtagtcgccgtgaacgttctttttcgcaacgggtttgccgccagaacacgcgtaag

SEQ ID NO: 4014 - DNA, 236 bp, synthetic construct
  source 1..236: mol_type = other DNA
cgtgaggctccggtgcccgtcagtgggcagagcgcacatcgcccacagtccccgagaagttggggggaggggtcggcaattgaaccggtgcctagagaaggtggcgcggggtaaactgggaaagtgatgtcgtgtactggctccgcctttttcccgagggtgggggagaaccgtatataagtgcagtagtcgccgtgaacgttctttttcgcaacgggtttgccgccagaacacag

SEQ ID NO: 4015 - DNA, 246 bp, synthetic construct
  source 1..246: mol_type = other DNA
gcatgcgtgaggctccggtgcccgtcagtgggcagagcgcacatcgcccacagtccccgagaagttggggggaggggtcggcaattgaaccggtgcctagagaaggtggcgcggggtaaactgggaaagtgatgtcgtgtactggctccgcctttttcccgagggtgggggagaaccgtatataagtgcagtagtcgccgtgaacgttctttttcgcaacgggtttgccgccagaacacgcgtaag

SEQ ID NO: 4016 - DNA, 241 bp, synthetic construct
  source 1..241: mol_type = other DNA
gcatgcgtgaggctccggtgcccgtcagtgggcagagcgcacatcgcccacagtccccgagaagttggggggaggggtcggcaattgaaccggtgcctagagaaggtggcgcggggtaaactgggaaagtgatgtcgtgtactggctccgcctttttcccgagggtgggggagaaccgtatataagtgcagtagtcgccgtgaacgttctttttcgcaacgggtttgccgccagaacacag

SEQ ID NO: 4017 - DNA, 257 bp, synthetic construct
  source 1..257: mol_type = other DNA
ggtggagaagagcatgcgtgaggctccggtgcccgtcagtgggcagagcgcacatcgcccacagtccccgagaagttggggggaggggtcggcaattgaaccggtgcctagagaaggtggcgcggggtaaactgggaaagtgatgtcgtgtactggctccgcctttttcccgagggtgggggagaaccgtatataagtgcagtagtcgccgtgaacgttctttttcgcaacgggtttgccgccagaacacgcgtaag

SEQ ID NO: 4018 - DNA, 252 bp, synthetic construct
  source 1..252: mol_type = other DNA
ggtggagaagagcatgcgtgaggctccggtgcccgtcagtgggcagagcgcacatcgcccacagtccccgagaagttggggggaggggtcggcaattgaaccggtgcctagagaaggtggcgcggggtaaactgggaaagtgatgtcgtgtactggctccgcctttttcccgagggtgggggagaaccgtatataagtgcagtagtcgccgtgaacgttctttttcgcaacgggtttgccgccagaacacag

SEQ ID NO: 4019 - DNA, 268 bp, synthetic construct
  source 1..268: mol_type = other DNA
gtcatcactgaggtggagaagagcatgcgtgaggctccggtgcccgtcagtgggcagagcgcacatcgcccacagtccccgagaagttggggggaggggtcggcaattgaaccggtgcctagagaaggtggcgcggggtaaactgggaaagtgatgtcgtgtactggctccgcctttttcccgagggtgggggagaaccgtatataagtgcagtagtcgccgtgaacgttctttttcgcaacgggtttgccgccagaacacgcgtaag

SEQ ID NO: 4020 - DNA, 263 bp, synthetic construct
  source 1..263: mol_type = other DNA
gtcatcactgaggtggagaagagcatgcgtgaggctccggtgcccgtcagtgggcagagcgcacatcgcccacagtccccgagaagttggggggaggggtcggcaattgaaccggtgcctagagaaggtggcgcggggtaaactgggaaagtgatgtcgtgtactggctccgcctttttcccgagggtgggggagaaccgtatataagtgcagtagtcgccgtgaacgttctttttcgcaacgggtttgccgccagaacacag

SEQ ID NO: 4021 - DNA, 654 bp, synthetic construct
  source 1..654: mol_type = other DNA
cgacattgattattgactagttattaatagtaatcaattacggggtcattagttcatagcccatatatggagttccgcgttacataacttacggtaaatggcccgcctggctgaccgcccaacgacccccgcccattgacgtcaataatgacgtatgttcccatagtaacgccaatagggactttccattgacgtcaatgggtggagtatttacggtaaactgcccacttggcagtacatcaagtgtatcatatgccaagtacgccccctattgacgtcaatgacggtaaatggcccgcctggcattatgcccagtacatgaccttatgggactttcctacttggcagtacatctacgtattagtcatcgctattaccatgtcgaggccacgttctgcttcactctccccatctcccccccctccccacccccaattttgtatttatttattttttaattattttgtgcagcgatgggggcggggggggggggcgcgcgccaggcggggcggggcggggcgaggggcggggcggggcgaggcggagaggtgcggcggcagccaatcagagcggcgcgctccgaaagtttccttttatggcgaggcggcggcggcggcggccctataaaaagcgaagcgcgcggcgggcgggagc

SEQ ID NO: 4022 - DNA, 260 bp, synthetic construct
  source 1..260: mol_type = other DNA
ccacgttctgcttcactctccccatctcccccccctccccacccccaattttgtatttatttattttttaattattttgtgcagcgatgggggcggggggggggggcgcgcgccaggcggggcggggcggggcgaggggcggggcggggcgaggcggagaggtgcggcggcagccaatcagagcggcgcgctccgaaagtttccttttatggcgaggcggcggcggcggcggccctataaaaagcgaagcgcgcggcggg

SEQ ID NO: 4023 - DNA, 500 bp, synthetic construct
  source 1..500: mol_type = other DNA
gggtaggggaggcgcttttcccaaggcagtctggagcatgcgctttagcagccccgctgggcacttggcgctacacaagtggcctctggcctcgcacacattccacatccaccggtaggcgccaaccggctccgttctttggtggccccttcgcgccaccttctactcctcccctagtcaggaagttcccccccgccccgcagctcgcgtcgtgcaggacgtgacaaatggaagtagcacgtctcactagtctcgtgcagatggacagcaccgctgagcaatggaagcgggtaggcctttggggcagcggccaatagcagctttgctccttcgctttctgggctcagaggctgggaaggggtgggtccgggggcgggctcaggggcgggctcaggggcggggcgggcgcccgaaggtcctccggaggcccggcattctgcacgcttcaaaagcgcacgtctgccgcgctgttctcctcttcctcatctccgggcctttcg

SEQ ID NO: 4024 - DNA, 84 bp, synthetic construct
  source 1..84: mol_type = other DNA
ccctaatgggccaggcggcaggggttgagaggtaggggagatgggctctgagactataaagccagcgggggcccagcagccctc

SEQ ID NO: 4025 - DNA, 658 bp, synthetic construct
  source 1..658: mol_type = other DNA
cgcgtggggttatttctctactttcgtgtctctgagtgtgcttccagtgcccccctccccccaaaaaatgccttctgagttgaatatcaacactacaaacctagtatctgcagagggccctgcgtatgagtgcaagtgggttttaggaccaggatgaggcggggtgggggtgcctacctgacgaccgaccccgacccactggacaagcacccaacccccattccccaaattgcgcatcccctatcagagagggggaggggaaacaggatgcggcgaggcgcgtgcgcactgccagcttcagcaccgcggacagtgccttcgcccccgcctggcggcgcgcgccaccgccgcctcagcactgaaggcgcgctgacgtcactcgccggtcccccgcaaactccccttcccggccaccttggtcgcgtccgcgccgccgccggcccagccggaccgcaccacgcgaggcgcgagataggggggcacgggcgcgaccatctgcgctgcggcgccggcgactcagcgctgcctcagtctgcggtgggcagcggaggagtcgtgtcgtgcctgagagcgcagctgtgctcctgggcaccgcgcagtccgcccccgcggctcctggccagaccacccctaggaccccctgccccaagtcgcagcc

SEQ ID NO: 4026 - DNA, 557 bp, synthetic construct
  source 1..557: mol_type = other DNA
tagtatctgcagagggccctgcgtatgagtgcaagtgggttttaggaccaggatgaggcggggtgggggtgcctacctgacgaccgaccccgacccactggacaagcacccaacccccattccccaaattgcgcatcccctatcagagagggggaggggaaacaggatgcggcgaggcgcgtgcgcactgccagcttcagcaccgcggacagtgccttcgcccccgcctggcggcgcgcgccaccgccgcctcagcactgaaggcgcgctgacgtcactcgccggtcccccgcaaactccccttcccggccaccttggtcgcgtccgcgccgccgccggcccagccggaccgcaccacgcgaggcgcgagataggggggcacgggcgcgaccatctgcgctgcggcgccggcgactcagcgctgcctcagtctgcggtgggcagcggaggagtcgtgtcgtgcctgagagcgcagctgtgctcctgggcaccgcgcagtccgcccccgcggctcctggccagaccacccctaggaccccctgccccaagtcgcagcc

SEQ ID NO: 4027 - DNA, 477 bp, Homo sapiens
  source 1..477: mol_type = genomic DNA
gggtggcatccctgtgacccctccccagtgcctctcctggccctggaagttgccactccagtgcccaccagccttgtcctaataaaattaagttgcatcattttgtctgactaggtgtccttctataatattatggggtggaggggggtggtatggagcaaggggcaagttgggaagacaacctgtagggcctgcggggtctattgggaaccaagctggagtgcagtggcacaatcttggctcactgcaatctccgcctcctgggttcaagcgattctcctgcctcagcctcccgagttgttgggattccaggcatgcatgaccaggctcagctaatttttgtttttttggtagagacggggtttcaccatattggccaggctggtctccaactcctaatctcaggtgatctacccaccttggcctcccaaattgctgggattacaggcgtgaaccactgctcccttccctgtcctt

SEQ ID NO: 4028 - DNA, 2169 bp, synthetic construct
  source 1..2169: mol_type = other DNA
ctgcgcgctcgctcgctcactgaggccgcccgggcaaagcccgggcgtcgggcgacctttggtcgcccggcctcagtgagcgagcgagcgcgcagagagggagtgtagccatgctctaggaagatcaattcaattcacgcgtcgacattgattattgactagttattaatagtaatcaattacggggtcattagttcatagcccatatatggagttccgcgttacataacttacggtaaatggcccgcctggctgaccgcccaacgacccccgcccattgacgtcaataatgacgtatgttcccatagtaacgccaatagggactttccattgacgtcaatgggtggagtatttacggtaaactgcccacttggcagtacatcaagtgtatcatatgccaagtacgccccctattgacgtcaatgacggtaaatggcccgcctggcattatgcccagtacatgaccttatgggactttcctacttggcagtacatctacgtattagtcatcgctattaccatgtcgaggccacgttctgcttcactctccccatctcccccccctccccacccccaattttgtatttatttattttttaattattttgtgcagcgatgggggcggggggggggggcgcgcgccaggcggggcggggcggggcgaggggcggggcggggcgaggcggagaggtgcggcggcagccaatcagagcggcgcgctccgaaagtttccttttatggcgaggcggcggcggcggcggccctataaaaagcgaagcgcgcggcgggcgggagcaagcttcgtttagtgaaccgtcagatcgcctggagacgccatccacgctgttttgacctccatagaagacaccgggaccgatccagcctccgcggattcgaatcccggccgggaacggtgcattggaacgcggattccccgtgccaagagtgacgtaagtaccgcctatagagtctataggcccacaaaaaatgctttcttcttttaatatacttttttgtttatcttatttctaatactttccctaatctctttctttcagggcaataatgatacaatgtatcatgcctctttgcaccattctaaagaataacagtgataatttctgggttaaggcaatagcaatatttctgcatataaatatttctgcatataaattgtaactgatgtaagaggtttcatattgctaatagcagctacaatccagctaccattctgcttttattttatggttgggataaggctggattattctgagtccaagctaggcccttttgctaatcatgttcatacctcttatcttcctcccacagctcctgggcaacgtgctggtctgtgtgctggcccatcactttggcaaagaattgggattcgaaccggtaccgagctctcccgcagaacaccatgcgctccacggaagcaggtcctcactttaatgctgtggccactgagaagtattaaagtgaggacctgcttctgaggagcgccttgacagcagccatgggagggcctcgaggggtggcatccctgtgacccctccccagtgcctctcctggccctggaagttgccactccagtgcccaccagccttgtcctaataaaattaagttgcatcattttgtctgactaggtgtccttctataatattatggggtggaggggggtggtatggagcaaggggcaagttgggaagacaacctgtagggcctgcggggtctattgggaaccaagctggagtgcagtggcacaatcttggctcactgcaatctccgcctcctgggttcaagcgattctcctgcctcagcctcccgagttgttgggattccaggcatgcatgaccaggctcagctaatttttgtttttttggtagagacggggtttcaccatattggccaggctggtctccaactcctaatctcaggtgatctacccaccttggcctcccaaattgctgggattacaggcgtgaaccactgctcccttccctgtccttatcgatgcctagggttaatcattaactacaaggaacccctagtgatggagttggccactccctctctgcgcgctcgctcgctcactgaggccgggcgaccaaaggtcgcccgacgcccgggctttgcccgggcggcctcagtgagcgagcgagcgcgcag

SEQ ID NO: 4029 - DNA, 1775 bp, synthetic construct
  source 1..1775: mol_type = other DNA
ctgcgcgctcgctcgctcactgaggccgcccgggcaaagcccgggcgtcgggcgacctttggtcgcccggcctcagtgagcgagcgagcgcgcagagagggagtgtagccatgctctaggaagatcaattcaattcacgcgtccacgttctgcttcactctccccatctcccccccctccccacccccaattttgtatttatttattttttaattattttgtgcagcgatgggggcggggggggggggcgcgcgccaggcggggcggggcggggcgaggggcggggcggggcgaggcggagaggtgcggcggcagccaatcagagcggcgcgctccgaaagtttccttttatggcgaggcggcggcggcggcggccctataaaaagcgaagcgcgcggcgggaagcttcgtttagtgaaccgtcagatcgcctggagacgccatccacgctgttttgacctccatagaagacaccgggaccgatccagcctccgcggattcgaatcccggccgggaacggtgcattggaacgcggattccccgtgccaagagtgacgtaagtaccgcctatagagtctataggcccacaaaaaatgctttcttcttttaatatacttttttgtttatcttatttctaatactttccctaatctctttctttcagggcaataatgatacaatgtatcatgcctctttgcaccattctaaagaataacagtgataatttctgggttaaggcaatagcaatatttctgcatataaatatttctgcatataaattgtaactgatgtaagaggtttcatattgctaatagcagctacaatccagctaccattctgcttttattttatggttgggataaggctggattattctgagtccaagctaggcccttttgctaatcatgttcatacctcttatcttcctcccacagctcctgggcaacgtgctggtctgtgtgctggcccatcactttggcaaagaattgggattcgaaccggtaccgagctctcccgcagaacaccatgcgctccacggaagcaggtcctcactttaatgctgtggccactgagaagtattaaagtgaggacctgcttctgaggagcgccttgacagcagccatgggagggcctcgaggggtggcatccctgtgacccctccccagtgcctctcctggccctggaagttgccactccagtgcccaccagccttgtcctaataaaattaagttgcatcattttgtctgactaggtgtccttctataatattatggggtggaggggggtggtatggagcaaggggcaagttgggaagacaacctgtagggcctgcggggtctattgggaaccaagctggagtgcagtggcacaatcttggctcactgcaatctccgcctcctgggttcaagcgattctcctgcctcagcctcccgagttgttgggattccaggcatgcatgaccaggctcagctaatttttgtttttttggtagagacggggtttcaccatattggccaggctggtctccaactcctaatctcaggtgatctacccaccttggcctcccaaattgctgggattacaggcgtgaaccactgctcccttccctgtccttatcgatgcctagggttaatcattaactacaaggaacccctagtgatggagttggccactccctctctgcgcgctcgctcgctcactgaggccgggcgaccaaaggtcgcccgacgcccgggctttgcccgggcggcctcagtgagcgagcgagcgcgcag

SEQ ID NO: 4030 - DNA, 1751 bp, synthetic construct
  source 1..1751: mol_type = other DNA
ctgcgcgctcgctcgctcactgaggccgcccgggcaaagcccgggcgtcgggcgacctttggtcgcccggcctcagtgagcgagcgagcgcgcagagagggagtgtagccatgctctaggaagatcaattcaattcacgcgtcgtgaggctccggtgcccgtcagtgggcagagcgcacatcgcccacagtccccgagaagttggggggaggggtcggcaattgaaccggtgcctagagaaggtggcgcggggtaaactgggaaagtgatgtcgtgtactggctccgcctttttcccgagggtgggggagaaccgtatataagtgcagtagtcgccgtgaacgttctttttcgcaacgggtttgccgccagaacacagaagcttcgtttagtgaaccgtcagatcgcctggagacgccatccacgctgttttgacctccatagaagacaccgggaccgatccagcctccgcggattcgaatcccggccgggaacggtgcattggaacgcggattccccgtgccaagagtgacgtaagtaccgcctatagagtctataggcccacaaaaaatgctttcttcttttaatatacttttttgtttatcttatttctaatactttccctaatctctttctttcagggcaataatgatacaatgtatcatgcctctttgcaccattctaaagaataacagtgataatttctgggttaaggcaatagcaatatttctgcatataaatatttctgcatataaattgtaactgatgtaagaggtttcatattgctaatagcagctacaatccagctaccattctgcttttattttatggttgggataaggctggattattctgagtccaagctaggcccttttgctaatcatgttcatacctcttatcttcctcccacagctcctgggcaacgtgctggtctgtgtgctggcccatcactttggcaaagaattgggattcgaaccggtaccgagctctcccgcagaacaccatgcgctccacggaagcaggtcctcactttaatgctgtggccactgagaagtattaaagtgaggacctgcttctgaggagcgccttgacagcagccatgggagggcctcgaggggtggcatccctgtgacccctccccagtgcctctcctggccctggaagttgccactccagtgcccaccagccttgtcctaataaaattaagttgcatcattttgtctgactaggtgtccttctataatattatggggtggaggggggtggtatggagcaaggggcaagttgggaagacaacctgtagggcctgcggggtctattgggaaccaagctggagtgcagtggcacaatcttggctcactgcaatctccgcctcctgggttcaagcgattctcctgcctcagcctcccgagttgttgggattccaggcatgcatgaccaggctcagctaatttttgtttttttggtagagacggggtttcaccatattggccaggctggtctccaactcctaatctcaggtgatctacccaccttggcctcccaaattgctgggattacaggcgtgaaccactgctcccttccctgtccttatcgatgcctagggttaatcattaactacaaggaacccctagtgatggagttggccactccctctctgcgcgctcgctcgctcactgaggccgggcgaccaaaggtcgcccgacgcccgggctttgcccgggcggcctcagtgagcgagcgagcgcgcag

SEQ ID NO: 4031 - DNA, 2015 bp, synthetic construct
  source 1..2015: mol_type = other DNA
ctgcgcgctcgctcgctcactgaggccgcccgggcaaagcccgggcgtcgggcgacctttggtcgcccggcctcagtgagcgagcgagcgcgcagagagggagtgtagccatgctctaggaagatcaattcaattcacgcgtgggtaggggaggcgcttttcccaaggcagtctggagcatgcgctttagcagccccgctgggcacttggcgctacacaagtggcctctggcctcgcacacattccacatccaccggtaggcgccaaccggctccgttctttggtggccccttcgcgccaccttctactcctcccctagtcaggaagttcccccccgccccgcagctcgcgtcgtgcaggacgtgacaaatggaagtagcacgtctcactagtctcgtgcagatggacagcaccgctgagcaatggaagcgggtaggcctttggggcagcggccaatagcagctttgctccttcgctttctgggctcagaggctgggaaggggtgggtccgggggcgggctcaggggcgggctcaggggcggggcgggcgcccgaaggtcctccggaggcccggcattctgcacgcttcaaaagcgcacgtctgccgcgctgttctcctcttcctcatctccgggcctttcgaagcttcgtttagtgaaccgtcagatcgcctggagacgccatccacgctgttttgacctccatagaagacaccgggaccgatccagcctccgcggattcgaatcccggccgggaacggtgcattggaacgcggattccccgtgccaagagtgacgtaagtaccgcctatagagtctataggcccacaaaaaatgctttcttcttttaatatacttttttgtttatcttatttctaatactttccctaatctctttctttcagggcaataatgatacaatgtatcatgcctctttgcaccattctaaagaataacagtgataatttctgggttaaggcaatagcaatatttctgcatataaatatttctgcatataaattgtaactgatgtaagaggtttcatattgctaatagcagctacaatccagctaccattctgcttttattttatggttgggataaggctggattattctgagtccaagctaggcccttttgctaatcatgttcatacctcttatcttcctcccacagctcctgggcaacgtgctggtctgtgtgctggcccatcactttggcaaagaattgggattcgaaccggtaccgagctctcccgcagaacaccatgcgctccacggaagcaggtcctcactttaatgctgtggccactgagaagtattaaagtgaggacctgcttctgaggagcgccttgacagcagccatgggagggcctcgaggggtggcatccctgtgacccctccccagtgcctctcctggccctggaagttgccactccagtgcccaccagccttgtcctaataaaattaagttgcatcattttgtctgactaggtgtccttctataatattatggggtggaggggggtggtatggagcaaggggcaagttgggaagacaacctgtagggcctgcggggtctattgggaaccaagctggagtgcagtggcacaatcttggctcactgcaatctccgcctcctgggttcaagcgattctcctgcctcagcctcccgagttgttgggattccaggcatgcatgaccaggctcagctaatttttgtttttttggtagagacggggtttcaccatattggccaggctggtctccaactcctaatctcaggtgatctacccaccttggcctcccaaattgctgggattacaggcgtgaaccactgctcccttccctgtccttatcgatgcctagggttaatcattaactacaaggaacccctagtgatggagttggccactccctctctgcgcgctcgctcgctcactgaggccgggcgaccaaaggtcgcccgacgcccgggctttgcccgggcggcctcagtgagcgagcgagcgcgcag

SEQ ID NO: 4032 - DNA, 1599 bp, synthetic construct
  source 1..1599: mol_type = other DNA
ctgcgcgctcgctcgctcactgaggccgcccgggcaaagcccgggcgtcgggcgacctttggtcgcccggcctcagtgagcgagcgagcgcgcagagagggagtgtagccatgctctaggaagatcaattcaattcacgcgtccctaatgggccaggcggcaggggttgagaggtaggggagatgggctctgagactataaagccagcgggggcccagcagccctcaagcttcgtttagtgaaccgtcagatcgcctggagacgccatccacgctgttttgacctccatagaagacaccgggaccgatccagcctccgcggattcgaatcccggccgggaacggtgcattggaacgcggattccccgtgccaagagtgacgtaagtaccgcctatagagtctataggcccacaaaaaatgctttcttcttttaatatacttttttgtttatcttatttctaatactttccctaatctctttctttcagggcaataatgatacaatgtatcatgcctctttgcaccattctaaagaataacagtgataatttctgggttaaggcaatagcaatatttctgcatataaatatttctgcatataaattgtaactgatgtaagaggtttcatattgctaatagcagctacaatccagctaccattctgcttttattttatggttgggataaggctggattattctgagtccaagctaggcccttttgctaatcatgttcatacctcttatcttcctcccacagctcctgggcaacgtgctggtctgtgtgctggcccatcactttggcaaagaattgggattcgaaccggtaccgagctctcccgcagaacaccatgcgctccacggaagcaggtcctcactttaatgctgtggccactgagaagtattaaagtgaggacctgcttctgaggagcgccttgacagcagccatgggagggcctcgaggggtggcatccctgtgacccctccccagtgcctctcctggccctggaagttgccactccagtgcccaccagccttgtcctaataaaattaagttgcatcattttgtctgactaggtgtccttctataatattatggggtggaggggggtggtatggagcaaggggcaagttgggaagacaacctgtagggcctgcggggtctattgggaaccaagctggagtgcagtggcacaatcttggctcactgcaatctccgcctcctgggttcaagcgattctcctgcctcagcctcccgagttgttgggattccaggcatgcatgaccaggctcagctaatttttgtttttttggtagagacggggtttcaccatattggccaggctggtctccaactcctaatctcaggtgatctacccaccttggcctcccaaattgctgggattacaggcgtgaaccactgctcccttccctgtccttatcgatgcctagggttaatcattaactacaaggaacccctagtgatggagttggccactccctctctgcgcgctcgctcgctcactgaggccgggcgaccaaaggtcgcccgacgcccgggctttgcccgggcggcctcagtgagcgagcgagcgcgcag

SEQ ID NO: 4033 - DNA, 2173 bp, synthetic construct
  source 1..2173: mol_type = other DNA
ctgcgcgctcgctcgctcactgaggccgcccgggcaaagcccgggcgtcgggcgacctttggtcgcccggcctcagtgagcgagcgagcgcgcagagagggagtgtagccatgctctaggaagatcaattcaattcacgcgtcgcgtggggttatttctctactttcgtgtctctgagtgtgcttccagtgcccccctccccccaaaaaatgccttctgagttgaatatcaacactacaaacctagtatctgcagagggccctgcgtatgagtgcaagtgggttttaggaccaggatgaggcggggtgggggtgcctacctgacgaccgaccccgacccactggacaagcacccaacccccattccccaaattgcgcatcccctatcagagagggggaggggaaacaggatgcggcgaggcgcgtgcgcactgccagcttcagcaccgcggacagtgccttcgcccccgcctggcggcgcgcgccaccgccgcctcagcactgaaggcgcgctgacgtcactcgccggtcccccgcaaactccccttcccggccaccttggtcgcgtccgcgccgccgccggcccagccggaccgcaccacgcgaggcgcgagataggggggcacgggcgcgaccatctgcgctgcggcgccggcgactcagcgctgcctcagtctgcggtgggcagcggaggagtcgtgtcgtgcctgagagcgcagctgtgctcctgggcaccgcgcagtccgcccccgcggctcctggccagaccacccctaggaccccctgccccaagtcgcagccaagcttcgtttagtgaaccgtcagatcgcctggagacgccatccacgctgttttgacctccatagaagacaccgggaccgatccagcctccgcggattcgaatcccggccgggaacggtgcattggaacgcggattccccgtgccaagagtgacgtaagtaccgcctatagagtctataggcccacaaaaaatgctttcttcttttaatatacttttttgtttatcttatttctaatactttccctaatctctttctttcagggcaataatgatacaatgtatcatgcctctttgcaccattctaaagaataacagtgataatttctgggttaaggcaatagcaatatttctgcatataaatatttctgcatataaattgtaactgatgtaagaggtttcatattgctaatagcagctacaatccagctaccattctgcttttattttatggttgggataaggctggattattctgagtccaagctaggcccttttgctaatcatgttcatacctcttatcttcctcccacagctcctgggcaacgtgctggtctgtgtgctggcccatcactttggcaaagaattgggattcgaaccggtaccgagctctcccgcagaacaccatgcgctccacggaagcaggtcctcactttaatgctgtggccactgagaagtattaaagtgaggacctgcttctgaggagcgccttgacagcagccatgggagggcctcgaggggtggcatccctgtgacccctccccagtgcctctcctggccctggaagttgccactccagtgcccaccagccttgtcctaataaaattaagttgcatcattttgtctgactaggtgtccttctataatattatggggtggaggggggtggtatggagcaaggggcaagttgggaagacaacctgtagggcctgcggggtctattgggaaccaagctggagtgcagtggcacaatcttggctcactgcaatctccgcctcctgggttcaagcgattctcctgcctcagcctcccgagttgttgggattccaggcatgcatgaccaggctcagctaatttttgtttttttggtagagacggggtttcaccatattggccaggctggtctccaactcctaatctcaggtgatctacccaccttggcctcccaaattgctgggattacaggcgtgaaccactgctcccttccctgtccttatcgatgcctagggttaatcattaactacaaggaacccctagtgatggagttggccactccctctctgcgcgctcgctcgctcactgaggccgggcgaccaaaggtcgcccgacgcccgggctttgcccgggcggcctcagtgagcgagcgagcgcgcag

SEQ ID NO: 4034 - DNA, 2072 bp, synthetic construct
  source 1..2072: mol_type = other DNA
ctgcgcgctcgctcgctcactgaggccgcccgggcaaagcccgggcgtcgggcgacctttggtcgcccggcctcagtgagcgagcgagcgcgcagagagggagtgtagccatgctctaggaagatcaattcaattcacgcgttagtatctgcagagggccctgcgtatgagtgcaagtgggttttaggaccaggatgaggcggggtgggggtgcctacctgacgaccgaccccgacccactggacaagcacccaacccccattccccaaattgcgcatcccctatcagagagggggaggggaaacaggatgcggcgaggcgcgtgcgcactgccagcttcagcaccgcggacagtgccttcgcccccgcctggcggcgcgcgccaccgccgcctcagcactgaaggcgcgctgacgtcactcgccggtcccccgcaaactccccttcccggccaccttggtcgcgtccgcgccgccgccggcccagccggaccgcaccacgcgaggcgcgagataggggggcacgggcgcgaccatctgcgctgcggcgccggcgactcagcgctgcctcagtctgcggtgggcagcggaggagtcgtgtcgtgcctgagagcgcagctgtgctcctgggcaccgcgcagtccgcccccgcggctcctggccagaccacccctaggaccccctgccccaagtcgcagccaagcttcgtttagtgaaccgtcagatcgcctggagacgccatccacgctgttttgacctccatagaagacaccgggaccgatccagcctccgcggattcgaatcccggccgggaacggtgcattggaacgcggattccccgtgccaagagtgacgtaagtaccgcctatagagtctataggcccacaaaaaatgctttcttcttttaatatacttttttgtttatcttatttctaatactttccctaatctctttctttcagggcaataatgatacaatgtatcatgcctctttgcaccattctaaagaataacagtgataatttctgggttaaggcaatagcaatatttctgcatataaatatttctgcatataaattgtaactgatgtaagaggtttcatattgctaatagcagctacaatccagctaccattctgcttttattttatggttgggataaggctggattattctgagtccaagctaggcccttttgctaatcatgttcatacctcttatcttcctcccacagctcctgggcaacgtgctggtctgtgtgctggcccatcactttggcaaagaattgggattcgaaccggtaccgagctctcccgcagaacaccatgcgctccacggaagcaggtcctcactttaatgctgtggccactgagaagtattaaagtgaggacctgcttctgaggagcgccttgacagcagccatgggagggcctcgaggggtggcatccctgtgacccctccccagtgcctctcctggccctggaagttgccactccagtgcccaccagccttgtcctaataaaattaagttgcatcattttgtctgactaggtgtccttctataatattatggggtggaggggggtggtatggagcaaggggcaagttgggaagacaacctgtagggcctgcggggtctattgggaaccaagctggagtgcagtggcacaatcttggctcactgcaatctccgcctcctgggttcaagcgattctcctgcctcagcctcccgagttgttgggattccaggcatgcatgaccaggctcagctaatttttgtttttttggtagagacggggtttcaccatattggccaggctggtctccaactcctaatctcaggtgatctacccaccttggcctcccaaattgctgggattacaggcgtgaaccactgctcccttccctgtccttatcgatgcctagggttaatcattaactacaaggaacccctagtgatggagttggccactccctctctgcgcgctcgctcgctcactgaggccgggcgaccaaaggtcgcccgacgcccgggctttgcccgggcggcctcagtgagcgagcgagcgcgcag

SEQ ID NO: 4035 - DNA, 2169 bp, synthetic construct
  source 1..2169: mol_type = other DNA
ctgcgcgctcgctcgctcactgaggccgcccgggcaaagcccgggcgtcgggcgacctttggtcgcccggcctcagtgagcgagcgagcgcgcagagagggagtgtagccatgctctaggaagatcaattcaattcacgcgtcgacattgattattgactagttattaatagtaatcaattacggggtcattagttcatagcccatatatggagttccgcgttacataacttacggtaaatggcccgcctggctgaccgcccaacgacccccgcccattgacgtcaataatgacgtatgttcccatagtaacgccaatagggactttccattgacgtcaatgggtggagtatttacggtaaactgcccacttggcagtacatcaagtgtatcatatgccaagtacgccccctattgacgtcaatgacggtaaatggcccgcctggcattatgcccagtacatgaccttatgggactttcctacttggcagtacatctacgtattagtcatcgctattaccatgtcgaggccacgttctgcttcactctccccatctcccccccctccccacccccaattttgtatttatttattttttaattattttgtgcagcgatgggggcggggggggggggcgcgcgccaggcggggcggggcggggcgaggggcggggcggggcgaggcggagaggtgcggcggcagccaatcagagcggcgcgctccgaaagtttccttttatggcgaggcggcggcggcggcggccctataaaaagcgaagcgcgcggcgggcgggagcaagcttcgtttagtgaaccgtcagatcacctggagacaccatccacactgttttgacctccatagaagacaccaggaccaatccagcctccacagattccaatcccagccaggaacagtgcattggaacacagattccccttgccaagagtgacgtaagtaccgcctatagagtctataggcccacaaaaaatgctttcttcttttaatatacttttttgtttatcttatttctaatactttccctaatctctttctttcagggcaataatgatacaatgtatcatgcctctttgcaccattctaaagaataacagtgataatttctgggttaaggcaatagcaatatttctgcatataaatatttctgcatataaattgtaactgatgtaagaggtttcatattgctaatagcagctacaatccagctaccattctgcttttattttatggttgggataaggctggattattctgagtccaagctaggcccttttgctaatcatgttcatacctcttatcttcctcccacagctcctgggcaacctgctggtctgtgtgctggcccatcactttggcaaagaattgggattcgaaccggtaccgagctctcccgcagaacaccatgcgctccacggaagcaggtcctcactttaatgctgtggccactgagaagtattaaagtgaggacctgcttctgaggagcgccttgacagcagccatgggagggcctcgaggggtggcatccctgtgacccctccccagtgcctctcctggccctggaagttgccactccagtgcccaccagccttgtcctaataaaattaagttgcatcattttgtctgactaggtgtccttctataatattatggggtggaggggggtggtatggagcaaggggcaagttgggaagacaacctgtagggcctgcggggtctattgggaaccaagctggagtgcagtggcacaatcttggctcactgcaatctccgcctcctgggttcaagcgattctcctgcctcagcctcccgagttgttgggattccaggcatgcatgaccaggctcagctaatttttgtttttttggtagagacggggtttcaccatattggccaggctggtctccaactcctaatctcaggtgatctacccaccttggcctcccaaattgctgggattacaggcgtgaaccactgctcccttccctgtccttatcgatgcctagggttaatcattaactacaaggaacccctagtgatggagttggccactccctctctgcgcgctcgctcgctcactgaggccgggcgaccaaaggtcgcccgacgcccgggctttgcccgggcggcctcagtgagcgagcgagcgcgcag

SEQ ID NO: 4036 - DNA, 1775 bp, synthetic construct
  source 1..1775: mol_type = other DNA
ctgcgcgctcgctcgctcactgaggccgcccgggcaaagcccgggcgtcgggcgacctttggtcgcccggcctcagtgagcgagcgagcgcgcagagagggagtgtagccatgctctaggaagatcaattcaattcacgcgtccacgttctgcttcactctccccatctcccccccctccccacccccaattttgtatttatttattttttaattattttgtgcagcgatgggggcggggggggggggcgcgcgccaggcggggcggggcggggcgaggggcggggcggggcgaggcggagaggtgcggcggcagccaatcagagcggcgcgctccgaaagtttccttttatggcgaggcggcggcggcggcggccctataaaaagcgaagcgcgcggcgggaagcttcgtttagtgaaccgtcagatcacctggagacaccatccacactgttttgacctccatagaagacaccaggaccaatccagcctccacagattccaatcccagccaggaacagtgcattggaacacagattccccttgccaagagtgacgtaagtaccgcctatagagtctataggcccacaaaaaatgctttcttcttttaatatacttttttgtttatcttatttctaatactttccctaatctctttctttcagggcaataatgatacaatgtatcatgcctctttgcaccattctaaagaataacagtgataatttctgggttaaggcaatagcaatatttctgcatataaatatttctgcatataaattgtaactgatgtaagaggtttcatattgctaatagcagctacaatccagctaccattctgcttttattttatggttgggataaggctggattattctgagtccaagctaggcccttttgctaatcatgttcatacctcttatcttcctcccacagctcctgggcaacctgctggtctgtgtgctggcccatcactttggcaaagaattgggattcgaaccggtaccgagctctcccgcagaacaccatgcgctccacggaagcaggtcctcactttaatgctgtggccactgagaagtattaaagtgaggacctgcttctgaggagcgccttgacagcagccatgggagggcctcgaggggtggcatccctgtgacccctccccagtgcctctcctggccctggaagttgccactccagtgcccaccagccttgtcctaataaaattaagttgcatcattttgtctgactaggtgtccttctataatattatggggtggaggggggtggtatggagcaaggggcaagttgggaagacaacctgtagggcctgcggggtctattgggaaccaagctggagtgcagtggcacaatcttggctcactgcaatctccgcctcctgggttcaagcgattctcctgcctcagcctcccgagttgttgggattccaggcatgcatgaccaggctcagctaatttttgtttttttggtagagacggggtttcaccatattggccaggctggtctccaactcctaatctcaggtgatctacccaccttggcctcccaaattgctgggattacaggcgtgaaccactgctcccttccctgtccttatcgatgcctagggttaatcattaactacaaggaacccctagtgatggagttggccactccctctctgcgcgctcgctcgctcactgaggccgggcgaccaaaggtcgcccgacgcccgggctttgcccgggcggcctcagtgagcgagcgagcgcgcag

SEQ ID NO: 4037 - DNA, 1751 bp, synthetic construct
  source 1..1751: mol_type = other DNA
ctgcgcgctcgctcgctcactgaggccgcccgggcaaagcccgggcgtcgggcgacctttggtcgcccggcctcagtgagcgagcgagcgcgcagagagggagtgtagccatgctctaggaagatcaattcaattcacgcgtcgtgaggctccggtgcccgtcagtgggcagagcgcacatcgcccacagtccccgagaagttggggggaggggtcggcaattgaaccggtgcctagagaaggtggcgcggggtaaactgggaaagtgatgtcgtgtactggctccgcctttttcccgagggtgggggagaaccgtatataagtgcagtagtcgccgtgaacgttctttttcgcaacgggtttgccgccagaacacagaagcttcgtttagtgaaccgtcagatcacctggagacaccatccacactgttttgacctccatagaagacaccaggaccaatccagcctccacagattccaatcccagccaggaacagtgcattggaacacagattccccttgccaagagtgacgtaagtaccgcctatagagtctataggcccacaaaaaatgctttcttcttttaatatacttttttgtttatcttatttctaatactttccctaatctctttctttcagggcaataatgatacaatgtatcatgcctctttgcaccattctaaagaataacagtgataatttctgggttaaggcaatagcaatatttctgcatataaatatttctgcatataaattgtaactgatgtaagaggtttcatattgctaatagcagctacaatccagctaccattctgcttttattttatggttgggataaggctggattattctgagtccaagctaggcccttttgctaatcatgttcatacctcttatcttcctcccacagctcctgggcaacctgctggtctgtgtgctggcccatcactttggcaaagaattgggattcgaaccggtaccgagctctcccgcagaacaccatgcgctccacggaagcaggtcctcactttaatgctgtggccactgagaagtattaaagtgaggacctgcttctgaggagcgccttgacagcagccatgggagggcctcgaggggtggcatccctgtgacccctccccagtgcctctcctggccctggaagttgccactccagtgcccaccagccttgtcctaataaaattaagttgcatcattttgtctgactaggtgtccttctataatattatggggtggaggggggtggtatggagcaaggggcaagttgggaagacaacctgtagggcctgcggggtctattgggaaccaagctggagtgcagtggcacaatcttggctcactgcaatctccgcctcctgggttcaagcgattctcctgcctcagcctcccgagttgttgggattccaggcatgcatgaccaggctcagctaatttttgtttttttggtagagacggggtttcaccatattggccaggctggtctccaactcctaatctcaggtgatctacccaccttggcctcccaaattgctgggattacaggcgtgaaccactgctcccttccctgtccttatcgatgcctagggttaatcattaactacaaggaacccctagtgatggagttggccactccctctctgcgcgctcgctcgctcactgaggccgggcgaccaaaggtcgcccgacgcccgggctttgcccgggcggcctcagtgagcgagcgagcgcgcag

SEQ ID NO: 4038 - DNA, 2015 bp, synthetic construct
  source 1..2015: mol_type = other DNA
ctgcgcgctcgctcgctcactgaggccgcccgggcaaagcccgggcgtcgggcgacctttggtcgcccggcctcagtgagcgagcgagcgcgcagagagggagtgtagccatgctctaggaagatcaattcaattcacgcgtgggtaggggaggcgcttttcccaaggcagtctggagcatgcgctttagcagccccgctgggcacttggcgctacacaagtggcctctggcctcgcacacattccacatccaccggtaggcgccaaccggctccgttctttggtggccccttcgcgccaccttctactcctcccctagtcaggaagttcccccccgccccgcagctcgcgtcgtgcaggacgtgacaaatggaagtagcacgtctcactagtctcgtgcagatggacagcaccgctgagcaatggaagcgggtaggcctttggggcagcggccaatagcagctttgctccttcgctttctgggctcagaggctgggaaggggtgggtccgggggcgggctcaggggcgggctcaggggcggggcgggcgcccgaaggtcctccggaggcccggcattctgcacgcttcaaaagcgcacgtctgccgcgctgttctcctcttcctcatctccgggcctttcgaagcttcgtttagtgaaccgtcagatcacctggagacaccatccacactgttttgacctccatagaagacaccaggaccaatccagcctccacagattccaatcccagccaggaacagtgcattggaacacagattccccttgccaagagtgacgtaagtaccgcctatagagtctataggcccacaaaaaatgctttcttcttttaatatacttttttgtttatcttatttctaatactttccctaatctctttctttcagggcaataatgatacaatgtatcatgcctctttgcaccattctaaagaataacagtgataatttctgggttaaggcaatagcaatatttctgcatataaatatttctgcatataaattgtaactgatgtaagaggtttcatattgctaatagcagctacaatccagctaccattctgcttttattttatggttgggataaggctggattattctgagtccaagctaggcccttttgctaatcatgttcatacctcttatcttcctcccacagctcctgggcaacctgctggtctgtgtgctggcccatcactttggcaaagaattgggattcgaaccggtaccgagctctcccgcagaacaccatgcgctccacggaagcaggtcctcactttaatgctgtggccactgagaagtattaaagtgaggacctgcttctgaggagcgccttgacagcagccatgggagggcctcgaggggtggcatccctgtgacccctccccagtgcctctcctggccctggaagttgccactccagtgcccaccagccttgtcctaataaaattaagttgcatcattttgtctgactaggtgtccttctataatattatggggtggaggggggtggtatggagcaaggggcaagttgggaagacaacctgtagggcctgcggggtctattgggaaccaagctggagtgcagtggcacaatcttggctcactgcaatctccgcctcctgggttcaagcgattctcctgcctcagcctcccgagttgttgggattccaggcatgcatgaccaggctcagctaatttttgtttttttggtagagacggggtttcaccatattggccaggctggtctccaactcctaatctcaggtgatctacccaccttggcctcccaaattgctgggattacaggcgtgaaccactgctcccttccctgtccttatcgatgcctagggttaatcattaactacaaggaacccctagtgatggagttggccactccctctctgcgcgctcgctcgctcactgaggccgggcgaccaaaggtcgcccgacgcccgggctttgcccgggcggcctcagtgagcgagcgagcgcgcag

SEQ ID NO: 4039 - DNA, 1599 bp, synthetic construct
  source 1..1599: mol_type = other DNA
ctgcgcgctcgctcgctcactgaggccgcccgggcaaagcccgggcgtcgggcgacctttggtcgcccggcctcagtgagcgagcgagcgcgcagagagggagtgtagccatgctctaggaagatcaattcaattcacgcgtccctaatgggccaggcggcaggggttgagaggtaggggagatgggctctgagactataaagccagcgggggcccagcagccctcaagcttcgtttagtgaaccgtcagatcacctggagacaccatccacactgttttgacctccatagaagacaccaggaccaatccagcctccacagattccaatcccagccaggaacagtgcattggaacacagattccccttgccaagagtgacgtaagtaccgcctatagagtctataggcccacaaaaaatgctttcttcttttaatatacttttttgtttatcttatttctaatactttccctaatctctttctttcagggcaataatgatacaatgtatcatgcctctttgcaccattctaaagaataacagtgataatttctgggttaaggcaatagcaatatttctgcatataaatatttctgcatataaattgtaactgatgtaagaggtttcatattgctaatagcagctacaatccagctaccattctgcttttattttatggttgggataaggctggattattctgagtccaagctaggcccttttgctaatcatgttcatacctcttatcttcctcccacagctcctgggcaacctgctggtctgtgtgctggcccatcactttggcaaagaattgggattcgaaccggtaccgagctctcccgcagaacaccatgcgctccacggaagcaggtcctcactttaatgctgtggccactgagaagtattaaagtgaggacctgcttctgaggagcgccttgacagcagccatgggagggcctcgaggggtggcatccctgtgacccctccccagtgcctctcctggccctggaagttgccactccagtgcccaccagccttgtcctaataaaattaagttgcatcattttgtctgactaggtgtccttctataatattatggggtggaggggggtggtatggagcaaggggcaagttgggaagacaacctgtagggcctgcggggtctattgggaaccaagctggagtgcagtggcacaatcttggctcactgcaatctccgcctcctgggttcaagcgattctcctgcctcagcctcccgagttgttgggattccaggcatgcatgaccaggctcagctaatttttgtttttttggtagagacggggtttcaccatattggccaggctggtctccaactcctaatctcaggtgatctacccaccttggcctcccaaattgctgggattacaggcgtgaaccactgctcccttccctgtccttatcgatgcctagggttaatcattaactacaaggaacccctagtgatggagttggccactccctctctgcgcgctcgctcgctcactgaggccgggcgaccaaaggtcgcccgacgcccgggctttgcccgggcggcctcagtgagcgagcgagcgcgcag

SEQ ID NO: 4040 - DNA, 2173 bp, synthetic construct
  source 1..2173: mol_type = other DNA
ctgcgcgctcgctcgctcactgaggccgcccgggcaaagcccgggcgtcgggcgacctttggtcgcccggcctcagtgagcgagcgagcgcgcagagagggagtgtagccatgctctaggaagatcaattcaattcacgcgtcgcgtggggttatttctctactttcgtgtctctgagtgtgcttccagtgcccccctccccccaaaaaatgccttctgagttgaatatcaacactacaaacctagtatctgcagagggccctgcgtatgagtgcaagtgggttttaggaccaggatgaggcggggtgggggtgcctacctgacgaccgaccccgacccactggacaagcacccaacccccattccccaaattgcgcatcccctatcagagagggggaggggaaacaggatgcggcgaggcgcgtgcgcactgccagcttcagcaccgcggacagtgccttcgcccccgcctggcggcgcgcgccaccgccgcctcagcactgaaggcgcgctgacgtcactcgccggtcccccgcaaactccccttcccggccaccttggtcgcgtccgcgccgccgccggcccagccggaccgcaccacgcgaggcgcgagataggggggcacgggcgcgaccatctgcgctgcggcgccggcgactcagcgctgcctcagtctgcggtgggcagcggaggagtcgtgtcgtgcctgagagcgcagctgtgctcctgggcaccgcgcagtccgcccccgcggctcctggccagaccacccctaggaccccctgccccaagtcgcagccaagcttcgtttagtgaaccgtcagatcacctggagacaccatccacactgttttgacctccatagaagacaccaggaccaatccagcctccacagattccaatcccagccaggaacagtgcattggaacacagattccccttgccaagagtgacgtaagtaccgcctatagagtctataggcccacaaaaaatgctttcttcttttaatatacttttttgtttatcttatttctaatactttccctaatctctttctttcagggcaataatgatacaatgtatcatgcctctttgcaccattctaaagaataacagtgataatttctgggttaaggcaatagcaatatttctgcatataaatatttctgcatataaattgtaactgatgtaagaggtttcatattgctaatagcagctacaatccagctaccattctgcttttattttatggttgggataaggctggattattctgagtccaagctaggcccttttgctaatcatgttcatacctcttatcttcctcccacagctcctgggcaacctgctggtctgtgtgctggcccatcactttggcaaagaattgggattcgaaccggtaccgagctctcccgcagaacaccatgcgctccacggaagcaggtcctcactttaatgctgtggccactgagaagtattaaagtgaggacctgcttctgaggagcgccttgacagcagccatgggagggcctcgaggggtggcatccctgtgacccctccccagtgcctctcctggccctggaagttgccactccagtgcccaccagccttgtcctaataaaattaagttgcatcattttgtctgactaggtgtccttctataatattatggggtggaggggggtggtatggagcaaggggcaagttgggaagacaacctgtagggcctgcggggtctattgggaaccaagctggagtgcagtggcacaatcttggctcactgcaatctccgcctcctgggttcaagcgattctcctgcctcagcctcccgagttgttgggattccaggcatgcatgaccaggctcagctaatttttgtttttttggtagagacggggtttcaccatattggccaggctggtctccaactcctaatctcaggtgatctacccaccttggcctcccaaattgctgggattacaggcgtgaaccactgctcccttccctgtccttatcgatgcctagggttaatcattaactacaaggaacccctagtgatggagttggccactccctctctgcgcgctcgctcgctcactgaggccgggcgaccaaaggtcgcccgacgcccgggctttgcccgggcggcctcagtgagcgagcgagcgcgcag

SEQ ID NO: 4041 - DNA, 2072 bp, synthetic construct
  source 1..2072: mol_type = other DNA
ctgcgcgctcgctcgctcactgaggccgcccgggcaaagcccgggcgtcgggcgacctttggtcgcccggcctcagtgagcgagcgagcgcgcagagagggagtgtagccatgctctaggaagatcaattcaattcacgcgttagtatctgcagagggccctgcgtatgagtgcaagtgggttttaggaccaggatgaggcggggtgggggtgcctacctgacgaccgaccccgacccactggacaagcacccaacccccattccccaaattgcgcatcccctatcagagagggggaggggaaacaggatgcggcgaggcgcgtgcgcactgccagcttcagcaccgcggacagtgccttcgcccccgcctggcggcgcgcgccaccgccgcctcagcactgaaggcgcgctgacgtcactcgccggtcccccgcaaactccccttcccggccaccttggtcgcgtccgcgccgccgccggcccagccggaccgcaccacgcgaggcgcgagataggggggcacgggcgcgaccatctgcgctgcggcgccggcgactcagcgctgcctcagtctgcggtgggcagcggaggagtcgtgtcgtgcctgagagcgcagctgtgctcctgggcaccgcgcagtccgcccccgcggctcctggccagaccacccctaggaccccctgccccaagtcgcagccaagcttcgtttagtgaaccgtcagatcacctggagacaccatccacactgttttgacctccatagaagacaccaggaccaatccagcctccacagattccaatcccagccaggaacagtgcattggaacacagattccccttgccaagagtgacgtaagtaccgcctatagagtctataggcccacaaaaaatgctttcttcttttaatatacttttttgtttatcttatttctaatactttccctaatctctttctttcagggcaataatgatacaatgtatcatgcctctttgcaccattctaaagaataacagtgataatttctgggttaaggcaatagcaatatttctgcatataaatatttctgcatataaattgtaactgatgtaagaggtttcatattgctaatagcagctacaatccagctaccattctgcttttattttatggttgggataaggctggattattctgagtccaagctaggcccttttgctaatcatgttcatacctcttatcttcctcccacagctcctgggcaacctgctggtctgtgtgctggcccatcactttggcaaagaattgggattcgaaccggtaccgagctctcccgcagaacaccatgcgctccacggaagcaggtcctcactttaatgctgtggccactgagaagtattaaagtgaggacctgcttctgaggagcgccttgacagcagccatgggagggcctcgaggggtggcatccctgtgacccctccccagtgcctctcctggccctggaagttgccactccagtgcccaccagccttgtcctaataaaattaagttgcatcattttgtctgactaggtgtccttctataatattatggggtggaggggggtggtatggagcaaggggcaagttgggaagacaacctgtagggcctgcggggtctattgggaaccaagctggagtgcagtggcacaatcttggctcactgcaatctccgcctcctgggttcaagcgattctcctgcctcagcctcccgagttgttgggattccaggcatgcatgaccaggctcagctaatttttgtttttttggtagagacggggtttcaccatattggccaggctggtctccaactcctaatctcaggtgatctacccaccttggcctcccaaattgctgggattacaggcgtgaaccactgctcccttccctgtccttatcgatgcctagggttaatcattaactacaaggaacccctagtgatggagttggccactccctctctgcgcgctcgctcgctcactgaggccgggcgaccaaaggtcgcccgacgcccgggctttgcccgggcggcctcagtgagcgagcgagcgcgcag

SEQ ID NO: 4042 - DNA, 566 bp, synthetic construct
  source 1..566: mol_type = other DNA
tcagatcgcctggagacgccatccacgctgttttgacctccatagaagacaccgggaccgatccagcctccgcggattcgaatcccggccgggaacggtgcattggaacgcggattccccgtgccaagagtgacgtaagtaccgcctatagagtctataggcccacaaaaaatgctttcttcttttaatatacttttttgtttatcttatttctaatactttccctaatctctttctttcagggcaataatgatacaatgtatcatgcctctttgcaccattctaaagaataacagtgataatttctgggttaaggcaatagcaatatttctgcatataaatatttctgcatataaattgtaactgatgtaagaggtttcatattgctaatagcagctacaatccagctaccattctgcttttattttatggttgggataaggctggattattctgagtccaagctaggcccttttgctaatcatgttcatacctcttatcttcctcccacagctcctgggcaacgtgctggtctgtgtgctggcccatcactttggcaaagaatt

SEQ ID NO: 4043 - DNA, 566 bp, synthetic construct
  source 1..566: mol_type = other DNA
tcagatcacctggagacaccatccacactgttttgacctccatagaagacaccaggaccaatccagcctccacagattccaatcccagccaggaacagtgcattggaacacagattccccttgccaagagtgacgtaagtaccgcctatagagtctataggcccacaaaaaatgctttcttcttttaatatacttttttgtttatcttatttctaatactttccctaatctctttctttcagggcaataatgatacaatgtatcatgcctctttgcaccattctaaagaataacagtgataatttctgggttaaggcaatagcaatatttctgcatataaatatttctgcatataaattgtaactgatgtaagaggtttcatattgctaatagcagctacaatccagctaccattctgcttttattttatggttgggataaggctggattattctgagtccaagctaggcccttttgctaatcatgttcatacctcttatcttcctcccacagctcctgggcaacctgctggtctgtgtgctggcccatcactttggcaaagaatt

SEQ ID NO: 4044 - DNA, 379 bp, synthetic construct
  source 1..379: mol_type = other DNA
gtaagtaccgcctatagagtctataggcccacaaaaaatgctttcttcttttaatatacttttttgtttatcttatttctaatactttccctaatctctttctttcagggcaataatgatacaatgtatcatgcctctttgcaccattctaaagaataacagtgataatttctgggttaaggcaatagcaatatttctgcatataaatatttctgcatataaattgtaactgatgtaagaggtttcatattgctaatagcagctacaatccagctaccattctgcttttattttatggttgggataaggctggattattctgagtccaagctaggcccttttgctaatcatgttcatacctcttatcttcctcccacag

SEQ ID NO: 4045 - DNA, 134 bp, synthetic construct
  source 1..134: mol_type = other DNA
tcagatcgcctggagacgccatccacgctgttttgacctccatagaagacaccgggaccgatccagcctccgcggattcgaatcccggccgggaacggtgcattggaacgcggattccccgtgccaagagtgac

SEQ ID NO: 4046 - DNA, 134 bp, synthetic construct
  source 1..134: mol_type = other DNA
tcagatcacctggagacaccatccacactgttttgacctccatagaagacaccaggaccaatccagcctccacagattccaatcccagccaggaacagtgcattggaacacagattccccttgccaagagtgac

SEQ ID NO: 4047 - DNA, 53 bp, synthetic construct
  source 1..53: mol_type = other DNA
ctcctgggcaacgtgctggtctgtgtgctggcccatcactttggcaaagaatt

SEQ ID NO: 4048 - DNA, 53 bp, synthetic construct
  source 1..53: mol_type = other DNA
ctcctgggcaacctgctggtctgtgtgctggcccatcactttggcaaagaatt

SEQ ID NO: 4049 - protein, 5 aa, synthetic construct
QDRPT

SEQ ID NO: 4050 - protein, 5 aa, synthetic construct
QSQQL

SEQ ID NO: 4051 - protein, 5 aa, synthetic construct
QAFHT

SEQ ID NO: 4052 - protein, 5 aa, synthetic construct
QKQQD

SEQ ID NO: 4053 - protein, 5 aa, synthetic construct
QNAQT

SEQ ID NO: 4054 - protein, 5 aa, synthetic construct
HNQLT

SEQ ID NO: 4055 - protein, 5 aa, synthetic construct
QNQQY

SEQ ID NO: 4056 - protein, 5 aa, synthetic construct
QKLNT

SEQ ID NO: 4057 - protein, 5 aa, synthetic construct
QNVQT

SEQ ID NO: 4058 - protein, 5 aa, synthetic construct
QAQQT

SEQ ID NO: 4059 - protein, 5 aa, synthetic construct
QNLQA

SEQ ID NO: 4060 - protein, 5 aa, synthetic construct
QTPPT

SEQ ID NO: 4061 - protein, 5 aa, synthetic construct
QYQHA

SEQ ID NO: 4062 - protein, 18 aa, synthetic construct
KTVNGHDSPHSKAQNQQT

SEQ ID NO: 4063 - protein, 5 aa, synthetic construct
QGQQA

SEQ ID NO: 4064 - protein, 5 aa, synthetic construct
QPPAT

SEQ ID NO: 4065 - protein, 5 aa, synthetic construct
QERPT

SEQ ID NO: 4066 - protein, 5 aa, synthetic construct
QDLQT

SEQ ID NO: 4067 - protein, 5 aa, synthetic construct
QAMHT

SEQ ID NO: 4068 - protein, 5 aa, synthetic construct
LNQQT

SEQ ID NO: 4069 - protein, 5 aa, synthetic construct
QHPST

SEQ ID NO: 4070 - protein, 5 aa, synthetic construct
PGLQT

SEQ ID NO: 4071 - protein, 5 aa, synthetic construct
QGIRT

SEQ ID NO: 4072 - protein, 5 aa, synthetic construct
QAPAT

SEQ ID NO: 4073 - protein, 5 aa, synthetic construct
QSQQI

SEQ ID NO: 4074 - protein, 5 aa, synthetic construct
QIPPT

SEQ ID NO: 4075 - protein, 5 aa, synthetic construct
QTQLT

SEQ ID NO: 4076 - protein, 5 aa, synthetic construct
QAPST

SEQ ID NO: 4077 - protein, 5 aa, synthetic construct
QNTYA

SEQ ID NO: 4078 - protein, 5 aa, synthetic construct
QNQHI

SEQ ID NO: 4079 - protein, 5 aa, synthetic construct
QNHLT

SEQ ID NO: 4080 - protein, 5 aa, synthetic construct
QIGMT

SEQ ID NO: 4081 - protein, 18 aa, synthetic construct
KTINGSGSPHKSGQNQQP

SEQ ID NO: 4082 - protein, 5 aa, synthetic construct
LNKQT

SEQ ID NO: 4083 - protein, 5 aa, synthetic construct
QLQQT

SEQ ID NO: 4084 - protein, 5 aa, synthetic construct
QRMST

SEQ ID NO: 4085 - protein, 5 aa, synthetic construct
QGILT

SEQ ID NO: 4086 - protein, 5 aa, synthetic construct
QDRQT

SEQ ID NO: 4087 - protein, 5 aa, synthetic construct
RDWQT

SEQ ID NO: 4088 - protein, 5 aa, synthetic construct
QNTHD

SEQ ID NO: 4089 - protein, 5 aa, synthetic construct
PNLQI

SEQ ID NO: 4090 - protein, 5 aa, synthetic construct
QERST

SEQ ID NO: 4091 - protein, 5 aa, synthetic construct
QNYQT

SEQ ID NO: 4092 - protein, 5 aa, synthetic construct
QRTCT

SEQ ID NO: 4093 - protein, 5 aa, synthetic construct
QIGHT

SEQ ID NO: 4094 - protein, 5 aa, synthetic construct
QGAIT

SEQ ID NO: 4095 - protein, 5 aa, synthetic construct
QVPPT

SEQ ID NO: 4096 - protein, 5 aa, synthetic construct
QVQQI

SEQ ID NO: 4097 - protein, 5 aa, synthetic construct
LMRQT

SEQ ID NO: 4098 - protein, 18 aa, synthetic construct
KTISKRGSPHSKAQNQQT

SEQ ID NO: 4099 - protein, 18 aa, synthetic construct
KGLGGSGSPHSKAQNQQT

SEQ ID NO: 4100 - protein, 18 aa, synthetic construct
KTINGHDSPHSKAQNLQT

SEQ ID NO: 4101 - protein, 18 aa, synthetic construct
KTINGHDSPHSKAQNQQI

SEQ ID NO: 4102 - protein, 18 aa, synthetic construct
KTINGSGSPHFTRQNQQT

SEQ ID NO: 4103 - protein, 18 aa, synthetic construct
KTINGSGSPHSLPWNQQT

SEQ ID NO: 4104 - protein, 18 aa, synthetic construct
KTINGHDSPHSKAQNHQT

SEQ ID NO: 4105 - protein, 18 aa, synthetic construct
KTMNGHDSPHSKAQNQQT

SEQ ID NO: 4106 - protein, 18 aa, synthetic construct
KPYKGSGSPHSKAQNQQT

SEQ ID NO: 4107 - protein, 18 aa, synthetic construct
KRLWGSGSPHSKAQNQQT

SEQ ID NO: 4108 - protein, 18 aa, synthetic construct
KRMRGSGSPHSKAQNQQT

SEQ ID NO: 4109 - protein, 18 aa, synthetic construct
KRTYGSGSPHSKAQNQQT

SEQ ID NO: 4110 - protein, 18 aa, synthetic construct
KTINCLRSPHSKAQNQQT

SEQ ID NO: 4111 - protein, 18 aa, synthetic construct
KTINFSRSPHSKAQNQQT

SEQ ID NO: 4112 - protein, 18 aa, synthetic construct
KTINGLRSPHFKAQNQQT

SEQ ID NO: 4113 - protein, 18 aa, synthetic construct
KTINGNRSPHNKAQNQQT

SEQ ID NO: 4114 - protein, 18 aa, synthetic construct
KTINGPRSPHYKAQNQQT

SEQ ID NO: 4115 - protein, 18 aa, synthetic construct
KTINGQASPHWKAQNQQT

SEQ ID NO: 4116 - protein, 18 aa, synthetic construct
KTINGRCSPHSKAQNQQT

SEQ ID NO: 4117 - protein, 18 aa, synthetic construct
KTINGRHSPHSKAQNQQT

SEQ ID NO: 4118 - protein, 18 aa, synthetic construct
KTINGRKSPHRKAQNQQT

SEQ ID NO: 4119 - protein, 18 aa, synthetic construct
KTINGRLSPHWKAQNQQT

SEQ ID NO: 4120 - protein, 18 aa, synthetic construct
KTINGRLSPHYKAQNQQT

SEQ ID NO: 4121 - protein, 18 aa, synthetic construct
KTINGRPSPHMKAQNQQT

SEQ ID NO: 4122 - protein, 18 aa, synthetic construct
KTINGRSSPHWKAQNQQT

SEQ ID NO: 4123 - protein, 18 aa, synthetic construct
KTINGRWSPHSKAQNQQT

SEQ ID NO: 4124 - protein, 18 aa, synthetic construct
KTINGSGSPHAPCQNQQT

SEQ ID NO: 4125 - protein, 18 aa, synthetic construct
KTINGSGSPHAWAQNQQT

SEQ ID NO: 4126 - protein, 18 aa, synthetic construct
KTINGSGSPHCMRQNQQT

SEQ ID NO: 4127 - protein, 18 aa, synthetic construct
KTINGSGSPHFCSQNQQT

SEQ ID NO: 4128 - protein, 18 aa, synthetic construct
KTINGSGSPHFLFQNQQT

SEQ ID NO: 4129 - protein, 18 aa, synthetic construct
KTINGSGSPHFWAQNQQT

SEQ ID NO: 4130 - protein, 18 aa, synthetic construct
KTINGSGSPHLCAQNQQT

SEQ ID NO: 4131 - protein, 18 aa, synthetic construct
KTINGSGSPHLRYQNQQT

SEQ ID NO: 4132 - protein, 18 aa, synthetic construct
KTINGSGSPHLYYQNQQT

SEQ ID NO: 4133 - protein, 18 aa, synthetic construct
KTINGSGSPHPLCQNQQT

SEQ ID NO: 4134 - protein, 18 aa, synthetic construct
KTINGSGSPHRIRQNQQT

SEQ ID NO: 4135 - protein, 18 aa, synthetic construct
KTINGSGSPHRLFQNQQT

SEQ ID NO: 4136 - protein, 18 aa, synthetic construct
KTINGSGSPHSCGQNQQT

SEQ ID NO: 4137 - protein, 18 aa, synthetic construct
KTINGSGSPHSCLRNQQT

SEQ ID NO: 4138 - protein, 18 aa, synthetic construct
KTINGSGSPHSCLSNQQT

SEQ ID NO: 4139 - protein, 18 aa, synthetic construct
KTINGSGSPHSCRLNQQT

SEQ ID NO: 4140 - protein, 18 aa, synthetic construct
KTINGSGSPHSCSLNQQT

SEQ ID NO: 4141 - protein, 18 aa, synthetic construct
KTINGSGSPHSKACTLQT

SEQ ID NO: 4142 - protein, 18 aa, synthetic construct
KTINGSGSPHSKAFRAQT

SEQ ID NO: 4143 - protein, 18 aa, synthetic construct
KTINGSGSPHSKAIRKQT

SEQ ID NO: 4144 - protein, 18 aa, synthetic construct
KTINGSGSPHSKAQASRT

SEQ ID NO: 4145 - protein, 18 aa, synthetic construct
KTINGSGSPHSKAQFELT

SEQ ID NO: 4146 - protein, 18 aa, synthetic construct
KTINGSGSPHSKAQIVIT

SEQ ID NO: 4147 - protein, 18 aa, synthetic construct
KTINGSGSPHSKAQLART

SEQ ID NO: 4148 - protein, 18 aa, synthetic construct
KTINGSGSPHSKAQLQRT

SEQ ID NO: 4149 - protein, 18 aa, synthetic construct
KTINGSGSPHSKAQNARR

SEQ ID NO: 4150 - protein, 18 aa, synthetic construct
KTINGSGSPHSKAQNCPR

SEQ ID NO: 4151 - protein, 18 aa, synthetic construct
KTINGSGSPHSKAQNMRR

SEQ ID NO: 4152 - protein, 18 aa, synthetic construct
KTINGSGSPHSKAQNRRV

SEQ ID NO: 4153 - protein, 18 aa, synthetic construct
KTINGSGSPHSKAQPSRT

SEQ ID NO: 4154 - protein, 18 aa, synthetic construct
KTINGSGSPHSKAQQVKT

SEQ ID NO: 4155 - protein, 18 aa, synthetic construct
KTINGSGSPHSKAQQVRT

SEQ ID NO: 4156 - protein, 18 aa, synthetic construct
KTINGSGSPHSKAQRLKT

SEQ ID NO: 4157 - protein, 18 aa, synthetic construct
KTINGSGSPHSKAQRRAT

SEQ ID NO: 4158 - protein, 18 aa, synthetic construct
KTINGSGSPHSKAQRRGT

SEQ ID NO: 4159 - protein, 18 aa, synthetic construct
KTINGSGSPHSKAQRRRT

SEQ ID NO: 4160 - protein, 18 aa, synthetic construct
KTINGSGSPHSKAQRTRT

SEQ ID NO: 4161 - protein, 18 aa, synthetic construct
KTINGSGSPHSKAQRVHT

SEQ ID NO: 4162 - protein, 18 aa, synthetic construct
KTINGSGSPHSKAQTYRT

SEQ ID NO: 4163 - protein, 18 aa, synthetic construct
KTINGSGSPHSKAQVRKT

SEQ ID NO: 4164 - protein, 18 aa, synthetic construct
KTINGSGSPHSKARGRQT

SEQ ID NO: 4165 - protein, 18 aa, synthetic construct
KTINGSGSPHSKARLCQT

SEQ ID NO: 4166 - protein, 18 aa, synthetic construct
KTINGSGSPHSKARLKQT

SEQ ID NO: 4167 - protein, 18 aa, synthetic construct
KTINGSGSPHSKARNSQT

SEQ ID NO: 4168 - protein, 18 aa, synthetic construct
KTINGSGSPHSKARWVQT

SEQ ID NO: 4169 - protein, 18 aa, synthetic construct
KTINGSGSPHSKAVRWQT

SEQ ID NO: 4170 - protein, 18 aa, synthetic construct
KTINGSGSPHSKAYTRQT

SEQ ID NO: 4171 - protein, 18 aa, synthetic construct
KTINGSGSPHSKCQSQQT

SEQ ID NO: 4172 - protein, 18 aa, synthetic construct
KTINGSGSPHSKFLRQQT

SEQ ID NO: 4173 - protein, 18 aa, synthetic construct
KTINGSGSPHSKFRFQQT

SEQ ID NO: 4174 - protein, 18 aa, synthetic construct
KTINGSGSPHSKFRLQQT

SEQ ID NO: 4175 - protein, 18 aa, synthetic construct
KTINGSGSPHSKFRRQQT

SEQ ID NO: 4176 - protein, 18 aa, synthetic construct
KTINGSGSPHSKGMKQQT

SEQ ID NO: 4177 - protein, 18 aa, synthetic construct
KTINGSGSPHSKKLRQQT

SEQ ID NO: 4178 - protein, 18 aa, synthetic construct
KTINGSGSPHSKKRPQQT

SEQ ID NO: 4179 - protein, 18 aa, synthetic construct
KTINGSGSPHSKKSRQQT

SEQ ID NO: 4180 - protein, 18 aa, synthetic construct
KTINGSGSPHSKLYRQQT

SEQ ID NO: 4181 - protein, 18 aa, synthetic construct
KTINGSGSPHSKLYWQQT

SEQ ID NO: 4182 - protein, 18 aa, synthetic construct
KTINGSGSPHSKPRMQQT

SEQ ID NO: 4183 - protein, 18 aa, synthetic construct
KTINGSGSPHSKRFPQQT

SEQ ID NO: 4184 - protein, 18 aa, synthetic construct
KTINGSGSPHSKRFRQQT

SEQ ID NO: 4185 - protein, 18 aa, synthetic construct
KTINGSGSPHSKRPYQQT

SEQ ID NO: 4186 - protein, 18 aa, synthetic construct
KTINGSGSPHSKRRMQQT

SEQ ID NO: 4187 - protein, 18 aa, synthetic construct
KTINGSGSPHSKRSKQQT

SEQ ID NO: 4188 - protein, 18 aa, synthetic construct
KTINGSGSPHSKRSRQQT

SEQ ID NO: 4189 - protein, 18 aa, synthetic construct
KTINGSGSPHSKRTMQQT

SEQ ID NO: 4190 - protein, 18 aa, synthetic construct
KTINGSGSPHSKRTRQQT

SEQ ID NO: 4191 - protein, 18 aa, synthetic construct
KTINGSGSPHSKRVRQQT

SEQ ID NO: 4192 - protein, 18 aa, synthetic construct
KTINGSGSPHSKRYIQQT

SEQ ID NO: 4193 - protein, 18 aa, synthetic construct
KTINGSGSPHSKRYNQQT

SEQ ID NO: 4194 - protein, 18 aa, synthetic construct
KTINGSGSPHSKRYPQQT

SEQ ID NO: 4195 - protein, 18 aa, synthetic construct
KTINGSGSPHSKRYSQQT

SEQ ID NO: 4196 - protein, 18 aa, synthetic construct
KTINGSGSPHSKTCIQQT

SEQ ID NO: 4197 - protein, 18 aa, synthetic construct
KTINGSGSPHSKWLTQQT

SEQ ID NO: 4198 - protein, 18 aa, synthetic construct
KTINGSGSPHSKWVVQQT

SEQ ID NO: 4199 - protein, 18 aa, synthetic construct
KTINGSGSPHSKYRLQQT

SEQ ID NO: 4200 - protein, 18 aa, synthetic construct
KTINGSGSPHSKYSKQQT

SEQ ID NO: 4201 - protein, 18 aa, synthetic construct
KTINGSGSPHSKYSRQQT

SEQ ID NO: 4202 - protein, 18 aa, synthetic construct
KTINGSGSPHSLKRNQQT

SEQ ID NO: 4203 - protein, 18 aa, synthetic construct
KTINGSGSPHSLWFNQQT

SEQ ID NO: 4204 - protein, 18 aa, synthetic construct
KTINGSGSPHSLWPNQQT

SEQ ID NO: 4205 - protein, 18 aa, synthetic construct
KTINGSGSPHSLWTNQQT

SEQ ID NO: 4206 - protein, 18 aa, synthetic construct
KTINGSGSPHSMRRNQQT

SEQ ID NO: 4207 - protein, 18 aa, synthetic construct
KTINGSGSPHSPCLNQQT

SEQ ID NO: 4208 - protein, 18 aa, synthetic construct
KTINGSGSPHSQWQNQQT

SEQ ID NO: 4209 - protein, 18 aa, synthetic construct
KTINGSGSPHSRCANQQT

SEQ ID NO: 4210 - protein, 18 aa, synthetic construct
KTINGSGSPHSRIRNQQT

SEQ ID NO: 4211 - protein, 18 aa, synthetic construct
KTINGSGSPHSRKSNQQT

SEQ ID NO: 4212 - protein, 18 aa, synthetic construct
KTINGSGSPHSRLWNQQT

SEQ ID NO: 4213 - protein, 18 aa, synthetic construct
KTINGSGSPHSRRFNQQT

SEQ ID NO: 4214 - protein, 18 aa, synthetic construct
KTINGSGSPHSRRPNQQT

SEQ ID NO: 4215 - protein, 18 aa, synthetic construct
KTINGSGSPHSRSCNQQT

SEQ ID NO: 4216 - protein, 18 aa, synthetic construct
KTINGSGSPHSRSKNQQT

SEQ ID NO: 4217 - protein, 18 aa, synthetic construct
KTINGSGSPHSRTKNQQT

SEQ ID NO: 4218 - protein, 18 aa, synthetic construct
KTINGSGSPHSRWLNQQT

SEQ ID NO: 4219 - protein, 18 aa, synthetic construct
KTINGSGSPHSSVCNQQT

SEQ ID NO: 4220 - protein, 18 aa, synthetic construct
KTINGSGSPHSSWRNQQT

SEQ ID NO: 4221 - protein, 18 aa, synthetic construct
KTINGSGSPHSVCQNQQT

SEQ ID NO: 4222 - protein, 18 aa, synthetic construct
KTINGSGSPHSVLCNQQT

SEQ ID NO: 4223 - protein, 18 aa, synthetic construct
KTINGSGSPHSVRRNQQT

SEQ ID NO: 4224 - protein, 18 aa, synthetic construct
KTINGSGSPHSVSCNQQT

SEQ ID NO: 4225 - protein, 18 aa, synthetic construct
KTINGSGSPHSWALNQQT

SEQ ID NO: 4226 - protein, 18 aa, synthetic construct
KTINGSGSPHSWITNQQT

SEQ ID NO: 4227 - protein, 18 aa, synthetic construct
KTINGSGSPHSWPMNQQT

SEQ ID NO: 4228 - protein, 18 aa, synthetic construct
KTINGSGSPHSWRSNQQT

SEQ ID NO: 4229 - protein, 18 aa, synthetic construct
KTINGSGSPHSYFLNQQT

SEQ ID NO: 4230 - protein, 18 aa, synthetic construct
KTINGSGSPHSYTYNQQT

SEQ ID NO: 4231 - protein, 18 aa, synthetic construct
KTINGSGSPHSYWQNQQT

SEQ ID NO: 4232 - protein, 18 aa, synthetic construct
KTINGSGSPHTLCQNQQT

SEQ ID NO: 4233 - protein, 18 aa, synthetic construct
KTINGSGSPHWLRQNQQT

SEQ ID NO: 4234 - protein, 18 aa, synthetic construct
KTINGSGSPHWPSQNQQT

SEQ ID NO: 4235 - protein, 18 aa, synthetic construct
KTINGSGSPHYLRQNQQT

SEQ ID NO: 4236 - protein, 18 aa, synthetic construct
KTINGSGSPHYTRQNQQT

SEQ ID NO: 4237 - protein, 18 aa, synthetic construct
KTINGSLSPHLWAQNQQT

SEQ ID NO: 4238 - protein, 18 aa, synthetic construct
KTINGSPSPHCQAQNQQT

SEQ ID NO: 4239 - protein, 18 aa, synthetic construct
KTINGSRSPHLCAQNQQT

SEQ ID NO: 4240 - protein, 18 aa, synthetic construct
KTINGSRSPHWRAQNQQT

SEQ ID NO: 4241 - protein, 18 aa, synthetic construct
KTINGSVSPHWLAQNQQT

SEQ ID NO: 4242 - protein, 18 aa, synthetic construct
KTINGTFSPHRKAQNQQT

SEQ ID NO: 4243 - protein, 18 aa, synthetic construct
KTINGWTSPHRKAQNQQT

SEQ ID NO: 4244 - protein, 18 aa, synthetic construct
KTINRGISPHSKAQNQQT

SEQ ID NO: 4245 - protein, 18 aa, synthetic construct
KTINTVRSPHSKAQNQQT

SEQ ID NO: 4246 - protein, 18 aa, synthetic construct
KTKLRSGSPHSKAQNQQT

SEQ ID NO: 4247 - protein, 18 aa, synthetic construct
KTRLRSGSPHSKAQNQQT

SEQ ID NO: 4248 - protein, 18 aa, synthetic construct
KWLLGSGSPHSKAQNQQT

SEQ ID NO: 4249 - protein, 18 aa, synthetic construct
KWSQGSGSPHSKAQNQQT

SEQ ID NO: 4250 - protein, 18 aa, synthetic construct
KWYLGSGSPHSKAQNQQT

SEQ ID NO: 4251 - protein, 18 aa, synthetic construct
KYHSGSGSPHSKAQNQQT

SEQ ID NO: 4252 - protein, 18 aa, synthetic construct
KYLPGSGSPHSKAQNQQT

SEQ ID NO: 4253 - protein, 18 aa, synthetic construct
KAINGGGSPHSKTQNQQT

SEQ ID NO: 4254 - protein, 18 aa, synthetic construct
KAINGHDSPHKRSPNQQT

SEQ ID NO: 4255 - protein, 18 aa, synthetic construct
KAINGHDSPHKSFSPQQT

SEQ ID NO: 4256 - protein, 18 aa, synthetic construct
KAINGHDSPHKSGENQQP

SEQ ID NO: 4257 - protein, 18 aa, synthetic construct
KAINGHDSPHKSGQLART

SEQ ID NO: 4258 - protein, 18 aa, synthetic construct
KAINGHDSPHKSGQNAFL

SEQ ID NO: 4259 - protein, 18 aa, synthetic construct
KAINGHDSPHKSGQNAYT

SEQ ID NO: 4260 - protein, 18 aa, synthetic construct
KAINGHDSPHKSGQNFAS

SEQ ID NO: 4261 - protein, 18 aa, synthetic construct
KAINGHDSPHKSGQNLAS

SEQ ID NO: 4262 - protein, 18 aa, synthetic construct
KAINGHDSPHKSGQNLGS

SEQ ID NO: 4263 - protein, 18 aa, synthetic construct
KAINGHDSPHKSGQNLKF

SEQ ID NO: 4264 - protein, 18 aa, synthetic construct
KAINGHDSPHKSGQNLLK

SEQ ID NO: 4265 - protein, 18 aa, synthetic construct
KAINGHDSPHKSGQNLSR

SEQ ID NO: 4266 - protein, 18 aa, synthetic construct
KAINGHDSPHKSGQNLSS

SEQ ID NO: 4267 - protein, 18 aa, synthetic construct
KAINGHDSPHKSGQNSLG

SEQ ID NO: 4268 - protein, 18 aa, synthetic construct
KAINGHDSPHKSGQNTLQ

SEQ ID NO: 4269 - protein, 18 aa, synthetic construct
KAINGHDSPHKSGQNTSL

SEQ ID NO: 4270 - protein, 18 aa, synthetic construct
KAINGHDSPHKSGQRLGT

SEQ ID NO: 4271 - protein, 18 aa, synthetic construct
KAINGHDSPHKSGQRNYT

SEQ ID NO: 4272 - protein, 18 aa, synthetic construct
KAINGHDSPHKSGQRPST

SEQ ID NO: 4273 - protein, 18 aa, synthetic construct
KAINGHDSPHKSGQRPVT

SEQ ID NO: 4274 - protein, 18 aa, synthetic construct
KAINGHDSPHKSGQVPST

SEQ ID NO: 4275 - protein, 18 aa, synthetic construct
KAINGHDSPHKSLSNQQT

SEQ ID NO: 4276 - protein, 18 aa, synthetic construct
KAINGHDSPHKSVLSQQT

SEQ ID NO: 4277 - protein, 18 aa, synthetic construct
KAINGHDSPHKTLQNQQT

SEQ ID NO: 4278 - protein, 18 aa, synthetic construct
KAINGHNSPHSKAQNQQT

SEQ ID NO: 4279 - protein, 18 aa, synthetic construct
KAINGLDSPHSKAQNQQT

SEQ ID NO: 4280 - protein, 18 aa, synthetic construct
KAINGSGSPHKSGQNQQT

SEQ ID NO: 4281 - protein, 18 aa, synthetic construct
KAINGSGSPHSKAQGQQT

SEQ ID NO: 4282 - protein, 18 aa, synthetic construct
KAINGSGSPHSKAQLSGT

SEQ ID NO: 4283 - protein, 18 aa, synthetic construct
KAINGSGSPHSKAQNGSL

SEQ ID NO: 4284 - protein, 18 aa, synthetic construct
KAINGSGSPHSKAQNSLL

SEQ ID NO: 4285 - protein, 18 aa, synthetic construct
KAINGSGSPHSKAVGLQT

SEQ ID NO: 4286 - protein, 18 aa, synthetic construct
KAINGSGSPHSKSLLQQT

SEQ ID NO: 4287 - protein, 18 aa, synthetic construct
KAINGSGSPHSKSLPQQT

SEQ ID NO: 4288 - protein, 18 aa, synthetic construct
KAINGSGSPHSKSTFQQT

SEQ ID NO: 4289 - protein, 18 aa, synthetic construct
KAITGHDSPHSKAQNQQT

SEQ ID NO: 4290 - protein, 18 aa, synthetic construct
KDVMGSGSPHSKAQNQQT

SEQ ID NO: 4291 - protein, 18 aa, synthetic construct
KEIVGSGSPHSKAQNQQT

SEQ ID NO: 4292 - protein, 18 aa, synthetic construct
KEIYGSGSPHSKAQNQQT

SEQ ID NO: 4293 - protein, 18 aa, synthetic construct
KELSGSGSPHSKAQNQQT

SEQ ID NO: 4294 - protein, 18 aa, synthetic construct
KETIGSGSPHSKAQNQQT

SEQ ID NO: 4295 - protein, 18 aa, synthetic construct
KEVLGSGSPHSKAQNQQT

SEQ ID NO: 4296 - protein, 18 aa, synthetic construct
KFALGHDSPHKSGQKQQT

SEQ ID NO: 4297 - protein, 18 aa, synthetic construct
KIINGHDSPHKSGQNLVL

SEQ ID NO: 4298 - protein, 18 aa, synthetic construct
KIINGHDSPHKSGQRNYT

SEQ ID NO: 4299 - protein, 18 aa, synthetic construct
KIINGHDSPHSKAQNQQT

SEQ ID NO: 4300 - protein, 18 aa, synthetic construct
KLNPGHDSPHKSGQTQQT

SEQ ID NO: 4301 - protein, 18 aa, synthetic construct
KLNRGHDSPHKSGQNQQS

SEQ ID NO: 4302 - protein, 18 aa, synthetic construct
KLSSGHDSPHKSGQNQQN

SEQ ID NO: 4303 - protein, 18 aa, synthetic construct
KNINGHDSPHSKAQNQQT

SEQ ID NO: 4304 - protein, 18 aa, synthetic construct
KNNDGSGSPHSKAQNQQT

SEQ ID NO: 4305 - protein, 18 aa, synthetic construct
KNVMGSGSPHSKAQNQQT

SEQ ID NO: 4306 - protein, 18 aa, synthetic construct
KPINGHDSPHKSGQNKLS

SEQ ID NO: 4307 - protein, 18 aa, synthetic construct
KPINGHDSPHKSGQNLSS

SEQ ID NO: 4308 - protein, 18 aa, synthetic construct
KPINGHDSPHSKAQNQQT

SEQ ID NO: 4309 - protein, 18 aa, synthetic construct
KRINGHDSPHSKAQNQQT

SEQ ID NO: 4310 - protein, 18 aa, synthetic construct
KSCSGHDSPHKSGQNQQS

SEQ ID NO: 4311 - protein, 18 aa, synthetic construct
KSINGHDSPHKSGQNLAS

SEQ ID NO: 4312 - protein, 18 aa, synthetic construct
KSINGHDSPHKSGQNLFL

SEQ ID NO: 4313 - protein, 18 aa, synthetic construct
KSINGHDSPHKSGQNLLM

SEQ ID NO: 4314 - protein, 18 aa, synthetic construct
KSINGHDSPHKSGQNLLQ

SEQ ID NO: 4315 - protein, 18 aa, synthetic construct
KSINGHDSPHKSGQNSLG

SEQ ID NO: 4316 - protein, 18 aa, synthetic construct
KSINGHDSPHKSGQNTLQ

SEQ ID NO: 4317 - protein, 18 aa, synthetic construct
KSINGHDSPHKSSSNQQT

SEQ ID NO: 4318 - protein, 18 aa, synthetic construct
KSINGHDSPHKYKLNQQT

SEQ ID NO: 4319 - protein, 18 aa, synthetic construct
KSINGSGSPHKSGQKQQT

SEQ ID NO: 4320 - protein, 18 aa, synthetic construct
KSINGSGSPHKSGQNQQT

SEQ ID NO: 4321 - protein, 18 aa, synthetic construct
KSINGSGSPHSKAQGLST

SEQ ID NO: 4322 - protein, 18 aa, synthetic construct
KSINGSGSPHSKAQLLGT

SEQ ID NO: 4323 - protein, 18 aa, synthetic construct
KSINGSGSPHSKTSWQQT

SEQ ID NO: 4324 - protein, 18 aa, synthetic construct
KSMNGHDSPHSKAQNQQT

SEQ ID NO: 4325 - protein, 18 aa, synthetic construct
KSTLGSGSPHSKAQNQHT

SEQ ID NO: 4326 - protein, 18 aa, synthetic construct
KSTLGSGSPHSKAQNQQN

SEQ ID NO: 4327 - protein, 18 aa, synthetic construct
KSTVGSGSPHSKAQTQQT

SEQ ID NO: 4328 - protein, 18 aa, synthetic construct
KTCKESGSPHSKAQNQQT

SEQ ID NO: 4329 - protein, 18 aa, synthetic construct
KTCKGSGSPHSKAQNQQT

SEQ ID NO: 4330 - protein, 18 aa, synthetic construct
KTCKSSGSPHSKAQNQQT

SEQ ID NO: 4331 - protein, 18 aa, synthetic construct
KTDMGSGSPHSKAQNQQT

SEQ ID NO: 4332 - protein, 18 aa, synthetic construct
KTDNGIGSPHSKAQNQQT

SEQ ID NO: 4333 - protein, 18 aa, synthetic construct
KTEGGSGSPHSKAQNQQT

SEQ ID NO: 4334 - protein, 18 aa, synthetic construct
KTEHHSGSPHSKAQNQQT

SEQ ID NO: 4335 - protein, 18 aa, synthetic construct
KTEKDSGSPHSKAQNQQT

SEQ ID NO: 4336 - protein, 18 aa, synthetic construct
KTELGHDSPHKRGQNQQT

SEQ ID NO: 4337 - protein, 18 aa, synthetic construct
KTESVSGSPHSKAQNQQT

SEQ ID NO: 4338 - protein, 18 aa, synthetic construct
KTETNSGSPHSKAQNQQT

SEQ ID NO: 4339 - protein, 18 aa, synthetic construct
KTETYSGSPHSKAQNQQT

SEQ ID NO: 4340 - protein, 18 aa, synthetic construct
KTEWLSGSPHSKAQNQQT

SEQ ID NO: 4341 - protein, 18 aa, synthetic construct
KTFNGSGSPHKSGQNQQT

SEQ ID NO: 4342 - protein, 18 aa, synthetic construct
KTGLRHDSPHKSGQKQQT

SEQ ID NO: 4343 - protein, 18 aa, synthetic construct
KTGLRHDSPHKSGQNQQS

SEQ ID NO: 4344 - protein, 18 aa, synthetic construct
KTGVTHDSPHKSGQKQQT

SEQ ID NO: 4345 - protein, 18 aa, synthetic construct
KTIDGHESPHSKAQNQQT

SEQ ID NO: 4346 - protein, 18 aa, synthetic construct
KTIEGHDSPHKSGQTQQT

SEQ ID NO: 4347 - protein, 18 aa, synthetic construct
KTIHGHDSPHSKAQNQQT

SEQ ID NO: 4348 - protein, 18 aa, synthetic construct
KTIHGHESPHSKAQNQQT

SEQ ID NO: 4349 - protein, 18 aa, synthetic construct
KTIIGHDSPHKSGQNRSS

SEQ ID NO: 4350 - protein, 18 aa, synthetic construct
KTIIGHDSPHKSGQRLGT

SEQ ID NO: 4351 - protein, 18 aa, synthetic construct
KTIIGSGSPHKSGQNQQT

SEQ ID NO: 4352 - protein, 18 aa, synthetic construct
KTIKGHDSPHKSGQNMLF

SEQ ID NO: 4353 - protein, 18 aa, synthetic construct
KTILGSGSPHSKAQNLQT

SEQ ID NO: 4354 - protein, 18 aa, synthetic construct
KTINGCSSPHWKAQNQQT

SEQ ID NO: 4355 - protein, 18 aa, synthetic construct
KTINGGGSTHSKAQNQQT

SEQ ID NO: 4356 - protein, 18 aa, synthetic construct
KTINGHDSPHKAGQSQQT

SEQ ID NO: 4357 - protein, 18 aa, synthetic construct
KTINGHDSPHKRGQNVPS

SEQ ID NO: 4358 - protein, 18 aa, synthetic construct
KTINGHDSPHKRGRSYQT

SEQ ID NO: 4359 - protein, 18 aa, synthetic construct
KTINGHDSPHKTGQNPPT

SEQ ID NO: 4360 - protein, 18 aa, synthetic construct
KTINGHDSPHSKAENQQT

SEQ ID NO: 4361 - protein, 18 aa, synthetic construct
KTINGHDSPHSKALSLQT

SEQ ID NO: 4362 - protein, 18 aa, synthetic construct
KTINGHDSPHSKAQGQQT

SEQ ID NO: 4363 - protein, 18 aa, synthetic construct
KTINGHDSPHSKAQHQQT

SEQ ID NO: 4364 - protein, 18 aa, synthetic construct
KTINGHDSPHSKAQIQQT

SEQ ID NO: 4365 - protein, 18 aa, synthetic construct
KTINGHDSPHSKAQKQQT

SEQ ID NO: 4366 - protein, 18 aa, synthetic construct
KTINGHDSPHSKAQNLSS

SEQ ID NO: 4367 - protein, 18 aa, synthetic construct
KTINGHDSPHSKAQNPQT

SEQ ID NO: 4368 - protein, 18 aa, synthetic construct
KTINGHDSPHSKAQNQET

SEQ ID NO: 4369 - protein, 18 aa, synthetic construct
KTINGHDSPHSKAQNQHT

SEQ ID NO: 4370 - protein, 18 aa, synthetic construct
KTINGHDSPHSKAQNQLT

SEQ ID NO: 4371 - protein, 18 aa, synthetic construct
KTINGHDSPHSKAQNQPT

SEQ ID NO: 4372 - protein, 18 aa, synthetic construct
KTINGHDSPHSKAQNQQA

SEQ ID NO: 4373 - protein, 18 aa, synthetic construct
KTINGHDSPHSKAQNTGS

SEQ ID NO: 4374 - protein, 18 aa, synthetic construct
KTINGHDSPHSKAQSQQT

SEQ ID NO: 4375 - protein, 18 aa, synthetic construct
KTINGHDSPHSKAQTQQT

SEQ ID NO: 4376 - protein, 18 aa, synthetic construct
KTINGHDSPHSKAQYQQT

SEQ ID NO: 4377 - protein, 18 aa, synthetic construct
KTINGHDSPHSKARNQQT

SEQ ID NO: 4378 - protein, 18 aa, synthetic construct
KTINGHDSPHSKLPGQQT

SEQ ID NO: 4379 - protein, 18 aa, synthetic construct
KTINGHDSPHSKSPNQQT

SEQ ID NO: 4380 - protein, 18 aa, synthetic construct
KTINGHESPHKSGQNAFL

SEQ ID NO: 4381 - protein, 18 aa, synthetic construct
KTINGIGSPHSKAPNEQT

SEQ ID NO: 4382 - protein, 18 aa, synthetic construct
KTINGQDSPHKSGQNLHM

SEQ ID NO: 4383 - protein, 18 aa, synthetic construct
KTINGRGSPHSKAQIGMT

SEQ ID NO: 4384 - protein, 18 aa, synthetic construct
KTINGRGSPHSKAQNQVL

SEQ ID NO: 4385 - protein, 18 aa, synthetic construct
KTINGRGSPHSKAQSPTT

SEQ ID NO: 4386 - protein, 18 aa, synthetic construct
KTINGRGSPHSKATSFQT

SEQ ID NO: 4387 - protein, 18 aa, synthetic construct
KTINGSGSPHFVVQNQQT

SEQ ID NO: 4388 - protein, 18 aa, synthetic construct
KTINGSGSPHKRGQKQQT

SEQ ID NO: 4389 - protein, 18 aa, synthetic construct
KTINGSGSPHKRGQNQET

SEQ ID NO: 4390 - protein, 18 aa, synthetic construct
KTINGSGSPHKRGQNQLT

SEQ ID NO: 4391 - protein, 18 aa, synthetic construct
KTINGSGSPHKRGRNQQT

SEQ ID NO: 4392 - protein, 18 aa, synthetic construct
KTINGSGSPHKSGGNQQT

SEQ ID NO: 4393 - protein, 18 aa, synthetic construct
KTINGSGSPHKSGHNQET

SEQ ID NO: 4394 - protein, 18 aa, synthetic construct
KTINGSGSPHKSGHNQLT

SEQ ID NO: 4395 - protein, 18 aa, synthetic construct
KTINGSGSPHKSGHNQQN

SEQ ID NO: 4396 - protein, 18 aa, synthetic construct
KTINGSGSPHKSGLNQLT

SEQ ID NO: 4397 - protein, 18 aa, synthetic construct
KTINGSGSPHKSGPNQQT

SEQ ID NO: 4398 - protein, 18 aa, synthetic construct
KTINGSGSPHKSGQGQQT

SEQ ID NO: 4399 - protein, 18 aa, synthetic construct
KTINGSGSPHKSGQHLQT

SEQ ID NO: 4400 - protein, 18 aa, synthetic construct
KTINGSGSPHKSGQHQQT

SEQ ID NO: 4401 - protein, 18 aa, synthetic construct
KTINGSGSPHKSGQKHQT

SEQ ID NO: 4402 - protein, 18 aa, synthetic construct
KTINGSGSPHKSGQKQQS

SEQ ID NO: 4403 - protein, 18 aa, synthetic construct
KTINGSGSPHKSGQNEQT

SEQ ID NO: 4404 - protein, 18 aa, synthetic construct
KTINGSGSPHKSGQNHQT

SEQ ID NO: 4405 - protein, 18 aa, synthetic construct
KTINGSGSPHKSGQNKQT

SEQ ID NO: 4406 - protein, 18 aa, synthetic construct
KTINGSGSPHKSGQNKTS

SEQ ID NO: 4407 - protein, 18 aa, synthetic construct
KTINGSGSPHKSGQNQEA

SEQ ID NO: 4408 - protein, 18 aa, synthetic construct
KTINGSGSPHKSGQNQET

SEQ ID NO: 4409 - protein, 18 aa, synthetic construct
KTINGSGSPHKSGQNQKT

SEQ ID NO: 4410 - protein, 18 aa, synthetic construct
KTINGSGSPHKSGQNQQI

SEQ ID NO: 4411 - protein, 18 aa, synthetic construct
KTINGSGSPHKSGQNQQR

SEQ ID NO: 4412 - protein, 18 aa, synthetic construct
KTINGSGSPHKSGQNQRT

SEQ ID NO: 4413 - protein, 18 aa, synthetic construct
KTINGSGSPHKSGQNQYT

SEQ ID NO: 4414 - protein, 18 aa, synthetic construct
KTINGSGSPHKSGQRQQT

SEQ ID NO: 4415 - protein, 18 aa, synthetic construct
KTINGSGSPHKSGQSQQT

SEQ ID NO: 4416 - protein, 18 aa, synthetic construct
KTINGSGSPHKSGQYQRT

SEQ ID NO: 4417 - protein, 18 aa, synthetic construct
KTINGSGSPHKSGRNQQA

SEQ ID NO: 4418 - protein, 18 aa, synthetic construct
KTINGSGSPHKSRHNQQT

SEQ ID NO: 4419 - protein, 18 aa, synthetic construct
KTINGSGSPHKSRQYQQT

SEQ ID NO: 4420 - protein, 18 aa, synthetic construct
KTINGSGSPHRKAQAPGT

SEQ ID NO: 4421 - protein, 18 aa, synthetic construct
KTINGSGSPHSKAAMKQT

SEQ ID NO: 4422 - protein, 18 aa, synthetic construct
KTINGSGSPHSKAGRQQT

SEQ ID NO: 4423 - protein, 18 aa, synthetic construct
KTINGSGSPHSKAGRTQT

SEQ ID NO: 4424 - protein, 18 aa, synthetic construct
KTINGSGSPHSKAKSNQT

SEQ ID NO: 4425 - protein, 18 aa, synthetic construct
KTINGSGSPHSKALKTQT

SEQ ID NO: 4426 - protein, 18 aa, synthetic construct
KTINGSGSPHSKAPRTQT

SEQ ID NO: 4427 - protein, 18 aa, synthetic construct
KTINGSGSPHSKAQAART

SEQ ID NO: 4428 - protein, 18 aa, synthetic construct
KTINGSGSPHSKAQAILT

SEQ ID NO: 4429 - protein, 18 aa, synthetic construct
KTINGSGSPHSKAQCRGT

SEQ ID NO: 4430 - protein, 18 aa, synthetic construct
KTINGSGSPHSKAQGLRT

SEQ ID NO: 4431 - protein, 18 aa, synthetic construct
KTINGSGSPHSKAQKGVL

SEQ ID NO: 4432 - protein, 18 aa, synthetic construct
KTINGSGSPHSKAQKSNT

SEQ ID NO: 4433 - protein, 18 aa, synthetic construct
KTINGSGSPHSKAQNNKF

SEQ ID NO: 4434 - protein, 18 aa, synthetic construct
KTINGSGSPHSKAQNRRT

SEQ ID NO: 4435 - protein, 18 aa, synthetic construct
KTINGSGSPHSKAQPKQT

SEQ ID NO: 4436 - protein, 18 aa, synthetic construct
KTINGSGSPHSKAQRAPT

SEQ ID NO: 4437 - protein, 18 aa, synthetic construct
KTINGSGSPHSKAQREHT

SEQ ID NO: 4438 - protein, 18 aa, synthetic construct
KTINGSGSPHSKAQRFGT

SEQ ID NO: 4439 - protein, 18 aa, synthetic construct
KTINGSGSPHSKAQRPCT

SEQ ID NO: 4440 - protein, 18 aa, synthetic construct
KTINGSGSPHSKAQRQAT

SEQ ID NO: 4441 - protein, 18 aa, synthetic construct
KTINGSGSPHSKAQRQPT

SEQ ID NO: 4442 - protein, 18 aa, synthetic construct
KTINGSGSPHSKAQTKLT

SEQ ID NO: 4443 - protein, 18 aa, synthetic construct
KTINGSGSPHSKAQTTHT

SEQ ID NO: 4444 - protein, 18 aa, synthetic construct
KTINGSGSPHSKAQVQRT

SEQ ID NO: 4445 - protein, 18 aa, synthetic construct
KTINGSGSPHSKAQVVRT

SEQ ID NO: 4446 - protein, 18 aa, synthetic construct
KTINGSGSPHSKAQWPNT

SEQ ID NO: 4447 - protein, 18 aa, synthetic construct
KTINGSGSPHSKAQYPST

SEQ ID NO: 4448 - protein, 18 aa, synthetic construct
KTINGSGSPHSKARALQT

SEQ ID NO: 4449 - protein, 18 aa, synthetic construct
KTINGSGSPHSKARDQHT

SEQ ID NO: 4450 - protein, 18 aa, synthetic construct
KTINGSGSPHSKARFQQT

SEQ ID NO: 4451 - protein, 18 aa, synthetic construct
KTINGSGSPHSKARRTQT

SEQ ID NO: 4452 - protein, 18 aa, synthetic construct
KTINGSGSPHSKARSLQT

SEQ ID NO: 4453 - protein, 18 aa, synthetic construct
KTINGSGSPHSKARVIQT

SEQ ID NO: 4454 - protein, 18 aa, synthetic construct
KTINGSGSPHSKAWYLQT

SEQ ID NO: 4455 - protein, 18 aa, synthetic construct
KTINGSGSPHSKGGGQQT

SEQ ID NO: 4456 - protein, 18 aa, synthetic construct
KTINGSGSPHSKGSRQQT

SEQ ID NO: 4457 - protein, 18 aa, synthetic construct
KTINGSGSPHSKLQRQQT

SEQ ID NO: 4458 - protein, 18 aa, synthetic construct
KTINGSGSPHSKMLRQQT

SEQ ID NO: 4459 - protein, 18 aa, synthetic construct
KTINGSGSPHSKSSIKQT

SEQ ID NO: 4460 - protein, 18 aa, synthetic construct
KTINGSGSPHSKVRFQQT

SEQ ID NO: 4461 - protein, 18 aa, synthetic construct
KTINGSGSPHSVVWNQQT

SEQ ID NO: 4462 - protein, 18 aa, synthetic construct
KTINGSTSPHKLAQNQQP

SEQ ID NO: 4463 - protein, 18 aa, synthetic construct
KTINRHDSPHKSGQRPST

SEQ ID NO: 4464 - protein, 18 aa, synthetic construct
KTINRIMSPHSKAQNQQT

SEQ ID NO: 4465 - protein, 18 aa, synthetic construct
KTINTARSPHSKAQNQQT

SEQ ID NO: 4466 - protein, 18 aa, synthetic construct
KTISGHDSPHSKAQNQQT

SEQ ID NO: 4467 - protein, 18 aa, synthetic construct
KTISGSGSPHKSGQNQQT

SEQ ID NO: 4468 - protein, 18 aa, synthetic construct
KTITGHDSPHKSGQRLGT

SEQ ID NO: 4469 - protein, 18 aa, synthetic construct
KTITGSGSPHKSGQNQQT

SEQ ID NO: 4470 - protein, 18 aa, synthetic construct
KTIYGHDSPHKSGQRLGT

SEQ ID NO: 4471 - protein, 18 aa, synthetic construct
KTLNGHDSPHKSGQNLFL

SEQ ID NO: 4472 - protein, 18 aa, synthetic construct
KTLNGHDSPHKSGQNLSS

SEQ ID NO: 4473 - protein, 18 aa, synthetic construct
KTLSFHDSPHKSGQNQQS

SEQ ID NO: 4474 - protein, 18 aa, synthetic construct
KTSNGSGSPHSKAQNTMT

SEQ ID NO: 4475 - protein, 18 aa, synthetic construct
KTTNGHDSPHSKAQNQQT

SEQ ID NO: 4476 - protein, 18 aa, synthetic construct
KTVNGGGSPHSKAQNQQT

SEQ ID NO: 4477 - protein, 18 aa, synthetic construct
KTVNGHDSPHKSGQNVSL

SEQ ID NO: 4478 - protein, 18 aa, synthetic construct
KTVNGHDSPHKSGQRPST

SEQ ID NO: 4479 - protein, 18 aa, synthetic construct
KTVNGHDSPHKSGQTQQA

SEQ ID NO: 4480 - protein, 18 aa, synthetic construct
KTVNGHESPHSKAQNQQT

SEQ ID NO: 4481 - protein, 18 aa, synthetic construct
KTVNGSGSPHSKAQGLST

SEQ ID NO: 4482 - protein, 18 aa, synthetic construct
KTVNGSGSPHSKAQNVTS

SEQ ID NO: 4483 - protein, 18 aa, synthetic construct
KTVPASGSPHSKAQNQQT

SEQ ID NO: 4484 - protein, 18 aa, synthetic construct
NTINGSGSPHSKAHNQQT

SEQ ID NO: 4485 - protein, 18 aa, synthetic construct
TTINGGGSPHSKAQNQQT

SEQ ID NO: 4486 - protein, 8 aa, synthetic construct
HDSPHSKA

SEQ ID NO: 4487 - protein, 5 aa, synthetic construct
QYSVT

SEQ ID NO: 4488 - protein, 5 aa, synthetic construct
QAITT

SEQ ID NO: 4489 - protein, 5 aa, synthetic construct
QKTLT

SEQ ID NO: 4490 - protein, 5 aa, synthetic construct
QNQWT

SEQ ID NO: 4491 - protein, 5 aa, synthetic construct
QLHHT

SEQ ID NO: 4492 - protein, 5 aa, synthetic construct
QNIII

SEQ ID NO: 4493 - protein, 5 aa, synthetic construct
QGHHT

SEQ ID NO: 4494 - protein, 5 aa, synthetic construct
QSKVT

SEQ ID NO: 4495 - protein, 5 aa, synthetic construct
QLPST

SEQ ID NO: 4496 - protein, 5 aa, synthetic construct
IGKQT

SEQ ID NO: 4497 - protein, 5 aa, synthetic construct
QAIHT

SEQ ID NO: 4498 - protein, 5 aa, synthetic construct
QHGLT

SEQ ID NO: 4499 - protein, 5 aa, synthetic construct
QFMCT

SEQ ID NO: 4500 - protein, 5 aa, synthetic construct
QHLQT

SEQ ID NO: 4501 - protein, 5 aa, synthetic construct
QNHQN

SEQ ID NO: 4502 - protein, 5 aa, synthetic construct
QPART

SEQ ID NO: 4503 - protein, 5 aa, synthetic construct
QSLQT

SEQ ID NO: 4504 - protein, 5 aa, synthetic construct
QSQLT

SEQ ID NO: 4505 - protein, 5 aa, synthetic construct
QDRQS

SEQ ID NO: 4506 - protein, 5 aa, synthetic construct
QMPST

SEQ ID NO: 4507 - protein, 5 aa, synthetic construct
QGSLT

SEQ ID NO: 4508 - protein, 5 aa, synthetic construct
QVPAT

SEQ ID NO: 4509 - protein, 5 aa, synthetic construct
QDKQT

SEQ ID NO: 4510 - protein, 5 aa, synthetic construct
HYQQT

SEQ ID NO: 4511 - protein, 5 aa, synthetic construct
QVPST

SEQ ID NO: 4512 - protein, 5 aa, synthetic construct
RGEQT

SEQ ID NO: 4513 - protein, 5 aa, synthetic construct
PGQQT

SEQ ID NO: 4514 - protein, 5 aa, synthetic construct
QSLQI

SEQ ID NO: 4515 - protein, 5 aa, synthetic construct
LEQQT

SEQ ID NO: 4516 - protein, 5 aa, synthetic construct
QNQST

SEQ ID NO: 4517 - protein, 5 aa, synthetic construct
QKVIT

SEQ ID NO: 4518 - protein, 5 aa, synthetic construct
QNNDQ

SEQ ID NO: 4519 - protein, 5 aa, synthetic construct
QSVHT

SEQ ID NO: 4520 - protein, 5 aa, synthetic construct
QPLGT

SEQ ID NO: 4521 - protein, 5 aa, synthetic construct
HNQET

SEQ ID NO: 4522 - protein, 5 aa, synthetic construct
QNLQI

SEQ ID NO: 4523 - protein, 5 aa, synthetic construct
QIQQT

SEQ ID NO: 4524 - protein, 5 aa, synthetic construct
QVRNT

SEQ ID NO: 4525 - protein, 5 aa, synthetic construct
PSNQT

SEQ ID NO: 4526 - protein, 5 aa, synthetic construct
QVGHT

SEQ ID NO: 4527 - protein, 5 aa, synthetic construct
QRDIT

SEQ ID NO: 4528 - protein, 5 aa, synthetic construct
QMPNT

SEQ ID NO: 4529 - protein, 5 aa, synthetic construct
RGLQT

SEQ ID NO: 4530 - protein, 5 aa, synthetic construct
QKQQT

SEQ ID NO: 4531 - protein, 5 aa, synthetic construct
PSLQT

SEQ ID NO: 4532 - protein, 5 aa, synthetic construct
QRDQT

SEQ ID NO: 4533 - protein, 5 aa, synthetic construct
QAKGT

SEQ ID NO: 4534 - protein, 5 aa, synthetic construct
QSAHT

SEQ ID NO: 4535 - protein, 5 aa, synthetic construct
QSTMT

SEQ ID NO: 4536 - protein, 5 aa, synthetic construct
QREMT

SEQ ID NO: 4537 - protein, 5 aa, synthetic construct
QYRAT

SEQ ID NO: 4538 - protein, 5 aa, synthetic construct
QWQQT

SEQ ID NO: 4539 - protein, 5 aa, synthetic construct
QRMNT

SEQ ID NO: 4540 - protein, 5 aa, synthetic construct
GDSQT

SEQ ID NO: 4541 - protein, 5 aa, synthetic construct
QKIST

SEQ ID NO: 4542 - protein, 5 aa, synthetic construct
PSMQT

SEQ ID NO: 4543 - protein, 5 aa, synthetic construct
SPRQT

SEQ ID NO: 4544 - protein, 5 aa, synthetic construct
MEQQT

SEQ ID NO: 4545 - protein, 5 aa, synthetic construct
QYQNT

SEQ ID NO: 4546 - protein, 5 aa, synthetic construct
QHQQT

SEQ ID NO: 4547 - protein, 5 aa, synthetic construct
INQQT

SEQ ID NO: 4548 - protein, 5 aa, synthetic construct
PNQQH

SEQ ID NO: 4549 - protein, 5 aa, synthetic construct
ENRQT

SEQ ID NO: 4550 - protein, 5 aa, synthetic construct
QTQQA

SEQ ID NO: 4551 - protein, 5 aa, synthetic construct
QNQAT

SEQ ID NO: 4552 - protein, 4 aa, synthetic construct
KTII

SEQ ID NO: 4553 - protein, 4 aa, synthetic construct
KTFP

SEQ ID NO: 4554 - protein, 4 aa, synthetic construct
KTEK

SEQ ID NO: 4555 - protein, 4 aa, synthetic construct
KTVN

SEQ ID NO: 4556 - protein, 4 aa, synthetic construct
KTFN

SEQ ID NO: 4557 - protein, 4 aa, synthetic construct
KTIN

SEQ ID NO: 4558 - protein, 4 aa, synthetic construct
TTIN

SEQ ID NO: 4559 - protein, 4 aa, synthetic construct
KSIN

SEQ ID NO: 4560 - protein, 4 aa, synthetic construct
KTER

SEQ ID NO: 4561 - protein, 4 aa, synthetic construct
KELH

SEQ ID NO: 4562 - protein, 4 aa, synthetic construct
KAIN

SEQ ID NO: 4563 - protein, 4 aa, synthetic construct
KTDN

SEQ ID NO: 4564 - protein, 4 aa, synthetic construct
KTFH

SEQ ID NO: 4565 - protein, 4 aa, synthetic construct
KTSN

SEQ ID NO: 4566 - protein, 4 aa, synthetic construct
ETIN

SEQ ID NO: 4567 - protein, 4 aa, synthetic construct
NTIN

SEQ ID NO: 4568 - protein, 4 aa, synthetic construct
KTEN

SEQ ID NO: 4569 - protein, 4 aa, synthetic construct
KTSS

SEQ ID NO: 4570 - protein, 4 aa, synthetic construct
KTCN

SEQ ID NO: 4571 - protein, 4 aa, synthetic construct
KTEH

SEQ ID NO: 4572 - protein, 4 aa, synthetic construct
KAEM

SEQ ID NO: 4573 - protein, 4 aa, synthetic construct
KATN

SEQ ID NO: 4574 - protein, 4 aa, synthetic construct
KAIK

SEQ ID NO: 4575 - protein, 4 aa, synthetic construct
KTDK

SEQ ID NO: 4576 - protein, 4 aa, synthetic construct
KTFK

SEQ ID NO: 4577 - protein, 4 aa, synthetic construct
KSDQ

SEQ ID NO: 4578 - protein, 4 aa, synthetic construct
KTEI

SEQ ID NO: 4579 - protein, 4 aa, synthetic construct
KTID

SEQ ID NO: 4580 - protein, 4 aa, synthetic construct
KNTN

SEQ ID NO: 4581 - protein, 4 aa, synthetic construct
KTET

SEQ ID NO: 4582 - protein, 4 aa, synthetic construct
KTEL

SEQ ID NO: 4583 - protein, 4 aa, synthetic construct
KNIN

SEQ ID NO: 4584 - protein, 4 aa, synthetic construct
KTEA

SEQ ID NO: 4585 - protein, 4 aa, synthetic construct
KTAN

SEQ ID NO: 4586 - protein, 4 aa, synthetic construct
NTIY

SEQ ID NO: 4587 - protein, 4 aa, synthetic construct
KTFS

SEQ ID NO: 4588 - protein, 4 aa, synthetic construct
KTES

SEQ ID NO: 4589 - protein, 4 aa, synthetic construct
KTTN

SEQ ID NO: 4590 - protein, 4 aa, synthetic construct
KTED

SEQ ID NO: 4591 - protein, 4 aa, synthetic construct
KTNN

SEQ ID NO: 4592 - protein, 4 aa, synthetic construct
KEVH

SEQ ID NO: 4593 - protein, 4 aa, synthetic construct
KTIS

SEQ ID NO: 4594 - protein, 4 aa, synthetic construct
KTVR

SEQ ID NO: 4595 - protein, 4 aa, synthetic construct
KTDR

SEQ ID NO: 4596 - protein, 4 aa, synthetic construct
ETIK

SEQ ID NO: 4597 - protein, 4 aa, synthetic construct
KNHI

SEQ ID NO: 4598 - protein, 4 aa, synthetic construct
KESD

SEQ ID NO: 4599 - protein, 4 aa, synthetic construct
KTIK

SEQ ID NO: 4600 - protein, 4 aa, synthetic construct
KTDL

SEQ ID NO: 4601 - protein, 4 aa, synthetic construct
KTVP

SEQ ID NO: 4602 - protein, 4 aa, synthetic construct
KTVI

SEQ ID NO: 4603 - protein, 4 aa, synthetic construct
KAEH

SEQ ID NO: 4604 - protein, 4 aa, synthetic construct
KNCL

SEQ ID NO: 4605 - protein, 4 aa, synthetic construct
KTVK

SEQ ID NO: 4606 - protein, 4 aa, synthetic construct
KNAD

SEQ ID NO: 4607 - protein, 4 aa, synthetic construct
KTIT

SEQ ID NO: 4608 - protein, 4 aa, synthetic construct
KNCV

SEQ ID NO: 4609 - protein, 4 aa, synthetic construct
KNAL

SEQ ID NO: 4610 - protein, 4 aa, synthetic construct
KVIN

SEQ ID NO: 4611 - protein, 4 aa, synthetic construct
KTEF

SEQ ID NO: 4612 - protein, 4 aa, synthetic construct
KTRE

SEQ ID NO: 4613 - protein, 4 aa, synthetic construct
KQGE

SEQ ID NO: 4614 - protein, 4 aa, synthetic construct
KSEK

SEQ ID NO: 4615 - protein, 4 aa, synthetic construct
KNVN

SEQ ID NO: 4616 - protein, 4 aa, synthetic construct
KGGE

SEQ ID NO: 4617 - protein, 4 aa, synthetic construct
KEFV

SEQ ID NO: 4618 - protein, 4 aa, synthetic construct
KSDK

SEQ ID NO: 4619 - protein, 4 aa, synthetic construct
KTEQ

SEQ ID NO: 4620 - protein, 4 aa, synthetic construct
KEVQ

SEQ ID NO: 4621 - protein, 4 aa, synthetic construct
KTEY

SEQ ID NO: 4622 - protein, 4 aa, synthetic construct
KNCW

SEQ ID NO: 4623 - protein, 4 aa, synthetic construct
KTDV

SEQ ID NO: 4624 - protein, 4 aa, synthetic construct
KSDI

SEQ ID NO: 4625 - protein, 4 aa, synthetic construct
KNSI

SEQ ID NO: 4626 - protein, 4 aa, synthetic construct
KNSL

SEQ ID NO: 4627 - protein, 4 aa, synthetic construct
KEVV

SEQ ID NO: 4628 - protein, 4 aa, synthetic construct
KTEP

SEQ ID NO: 4629 - protein, 4 aa, synthetic construct
KSEL

SEQ ID NO: 4630 - protein, 4 aa, synthetic construct
KTWQ

SEQ ID NO: 4631 - protein, 4 aa, synthetic construct
KTEV

SEQ ID NO: 4632 - protein, 4 aa, synthetic construct
KAVN

SEQ ID NO: 4633 - protein, 4 aa, synthetic construct
KGVL

SEQ ID NO: 4634 - protein, 4 aa, synthetic construct
KTEG

SEQ ID NO: 4635 - protein, 4 aa, synthetic construct
KTRD

SEQ ID NO: 4636 - protein, 4 aa, synthetic construct
KTGN

SEQ ID NO: 4637 - protein, 4 aa, synthetic construct
KNAI

SEQ ID NO: 4638 - protein, 4 aa, synthetic construct
KAEN

SEQ ID NO: 4639 - protein, 4 aa, synthetic construct
KAET

SEQ ID NO: 4640 - protein, 4 aa, synthetic construct
KTVH

SEQ ID NO: 4641 - protein, 4 aa, synthetic construct
KETA

SEQ ID NO: 4642 - protein, 4 aa, synthetic construct
KNNL

SEQ ID NO: 4643 - protein, 4 aa, synthetic construct
EAIN

SEQ ID NO: 4644 - protein, 4 aa, synthetic construct
KSLN

SEQ ID NO: 4645 - protein, 4 aa, synthetic construct
KTIP

SEQ ID NO: 4646 - protein, 4 aa, synthetic construct
KTIH

SEQ ID NO: 4647 - protein, 9 aa, synthetic construct
  VARIANT 1: note = Any amino acid
  VARIANT 2: note = Any amino acid other than S
  VARIANT 3: note = Any amino acid other than G
  VARIANT 8: note = Any amino acid
  VARIANT 9: note = Any amino acid
XXXSPHKXX

SEQ ID NO: 4648 - protein, 5 aa, synthetic construct
NPHKS

SEQ ID NO: 4649 - protein, 6 aa, synthetic construct
NPHKSG

SEQ ID NO: 4650 - protein, 6 aa, synthetic construct
SPHKIV

SEQ ID NO: 4651 - protein, 6 aa, synthetic construct
GHDNPH

SEQ ID NO: 4652 - protein, 6 aa, synthetic construct
AHDSPH

SEQ ID NO: 4653 - protein, 6 aa, synthetic construct
KHDSPH

SEQ ID NO: 4654 - protein, 6 aa, synthetic construct
WHDSPH

SEQ ID NO: 4655 - protein, 6 aa, synthetic construct
RHDSPH

SEQ ID NO: 4656 - protein, 6 aa, synthetic construct
LHDSPH

SEQ ID NO: 4657 - protein, 6 aa, synthetic construct
IHDSPH

SEQ ID NO: 4658 - protein, 6 aa, synthetic construct
MHDSPH

SEQ ID NO: 4659 - protein, 6 aa, synthetic construct
NHDSPH

SEQ ID NO: 4660 - protein, 6 aa, synthetic construct
THDSPH

SEQ ID NO: 4661 - protein, 6 aa, synthetic construct
EHDSPH

SEQ ID NO: 4662 - protein, 6 aa, synthetic construct
QHDSPH

SEQ ID NO: 4663 - protein, 6 aa, synthetic construct
YHDSPH

SEQ ID NO: 4664 - protein, 6 aa, synthetic construct
HHDSPH

SEQ ID NO: 4665 - protein, 6 aa, synthetic construct
FHDSPH

SEQ ID NO: 4666 - protein, 6 aa, synthetic construct
VHDSPH

SEQ ID NO: 4667 - protein, 9 aa, synthetic construct
GHDNPHKSG

SEQ ID NO: 4668 - protein, 9 aa, synthetic construct
AHDSPHKSG

SEQ ID NO: 4669 - protein, 9 aa, synthetic construct
AHDSPHKIG

SEQ ID NO: 4670 - protein, 9 aa, synthetic construct
KHDSPHKSG

SEQ ID NO: 4671 - protein, 9 aa, synthetic construct
WHDSPHKSG

SEQ ID NO: 4672 - protein, 9 aa, synthetic construct
RHDSPHKSG

SEQ ID NO: 4673 - protein, 9 aa, synthetic construct
LHDSPHKSG

SEQ ID NO: 4674 - protein, 9 aa, synthetic construct
IHDSPHKSG

SEQ ID NO: 4675 - protein, 9 aa, synthetic construct
MHDSPHKSG

SEQ ID NO: 4676 - protein, 9 aa, synthetic construct
NHDSPHKSG

SEQ ID NO: 4677 - protein, 9 aa, synthetic construct
THDSPHKSG

SEQ ID NO: 4678 - protein, 9 aa, synthetic construct
EHDSPHKSG

SEQ ID NO: 4679 - DNA, 22 bp, synthetic construct
  source 1..22: mol_type = other DNA
atacatacttctttacattcca

SEQ ID NO: 4680 - protein, 9 aa, synthetic construct
QHDSPHKSG

SEQ ID NO: 4681 - protein, 9 aa, synthetic construct
RHDSPHKIV

SEQ ID NO: 4682 - protein, 9 aa, synthetic construct
YHDSPHKSG

SEQ ID NO: 4683 - protein, 9 aa, synthetic construct
HHDSPHKSG

SEQ ID NO: 4684 - protein, 9 aa, synthetic construct
FHDSPHKSG

SEQ ID NO: 4685 - protein, 9 aa, synthetic construct
VHDSPHKSG

SEQ ID NO: 4686 - protein, 5 aa, synthetic construct
QIRQT

SEQ ID NO: 4687 - protein, 5 aa, synthetic construct
QNQHA

SEQ ID NO: 4688 - protein, 5 aa, synthetic construct
QSVQT

SEQ ID NO: 4689 - protein, 5 aa, synthetic construct
RSQQT

SEQ ID NO: 4690 - protein, 5 aa, synthetic construct
QNKLE

SEQ ID NO: 4691 - protein, 5 aa, synthetic construct
QNQQK

SEQ ID NO: 4692 - protein, 5 aa, synthetic construct
QHQQA

SEQ ID NO: 4693 - protein, 5 aa, synthetic construct
QIQHT

SEQ ID NO: 4694 - protein, 5 aa, synthetic construct
PRQQT

SEQ ID NO: 4695 - protein, 5 aa, synthetic construct
HTQQT

SEQ ID NO: 4696 - protein, 5 aa, synthetic construct
QRQHT

SEQ ID NO: 4697 - protein, 5 aa, synthetic construct
QNQQS

SEQ ID NO: 4698 - protein, 5 aa, synthetic construct
RNQET

SEQ ID NO: 4699 - protein, 5 aa, synthetic construct
KNQQT

SEQ ID NO: 4700 - protein, 5 aa, synthetic construct
QTQQT

SEQ ID NO: 4701 - protein, 5 aa, synthetic construct
QTQQI

SEQ ID NO: 4702 - protein, 5 aa, synthetic construct
QSKQA

SEQ ID NO: 4703 - protein, 5 aa, synthetic construct
QNQPP

SEQ ID NO: 4704 - protein, 5 aa, synthetic construct
QSPQT

SEQ ID NO: 4705 - protein, 5 aa, synthetic construct
QNQQG

SEQ ID NO: 4706 - protein, 5 aa, synthetic construct
QNQHT

SEQ ID NO: 4707 - protein, 5 aa, synthetic construct
QTRQT

SEQ ID NO: 4708 - protein, 5 aa, synthetic construct
QNLHT

SEQ ID NO: 4709 - protein, 5 aa, synthetic construct
QNQET

SEQ ID NO: 4710 - protein, 5 aa, synthetic construct
LNQPT

SEQ ID NO: 4711 - protein, 5 aa, synthetic construct
QNQDT

SEQ ID NO: 4712 - protein, 5 aa, synthetic construct
RNQQT

SEQ ID NO: 4713 - protein, 5 aa, synthetic construct
QNLLT

SEQ ID NO: 4714 - protein, 5 aa, synthetic construct
QLVIT

SEQ ID NO: 4715 - protein, 5 aa, synthetic construct
RTQET

SEQ ID NO: 4716 - protein, 5 aa, synthetic construct
QTHQT

SEQ ID NO: 4717 - protein, 5 aa, synthetic construct
QNQPA

SEQ ID NO: 4718 - protein, 5 aa, synthetic construct
QDQHT

SEQ ID NO: 4719 - protein, 5 aa, synthetic construct
QSQHT

SEQ ID NO: 4720 - protein, 5 aa, synthetic construct
RNQQI

SEQ ID NO: 4721 - protein, 5 aa, synthetic construct
VRQQT

SEQ ID NO: 4722 - protein, 5 aa, synthetic construct
QNQHS

SEQ ID NO: 4723 - protein, 5 aa, synthetic construct
AWQQT

SEQ ID NO: 4724 - protein, 5 aa, synthetic construct
QSVPT

SEQ ID NO: 4725 - protein, 5 aa, synthetic construct
QNIQP

SEQ ID NO: 4726 - protein, 5 aa, synthetic construct
QNHLN

SEQ ID NO: 4727 - protein, 5 aa, synthetic construct
LDQQT

SEQ ID NO: 4728 - protein, 5 aa, synthetic construct
PDQQS

SEQ ID NO: 4729 - protein, 5 aa, synthetic construct
ESQQT

SEQ ID NO: 4730 - protein, 5 aa, synthetic construct
QNKQT

SEQ ID NO: 4731 - protein, 5 aa, synthetic construct
QRQLT

SEQ ID NO: 4732 - protein, 5 aa, synthetic construct
QIIVT

SEQ ID NO: 4733 - protein, 5 aa, synthetic construct
QKQST

SEQ ID NO: 4734 - protein, 5 aa, synthetic construct
QSHQT

SEQ ID NO: 4735 - protein, 5 aa, synthetic construct
QFVVT

SEQ ID NO: 4736 - protein, 5 aa, synthetic construct
QSQPT

SEQ ID NO: 4737 - protein, 5 aa, synthetic construct
QNEQT

SEQ ID NO: 4738 - protein, 5 aa, synthetic construct
RNRQT

SEQ ID NO: 4739 - protein, 5 aa, synthetic construct
QSKQT

SEQ ID NO: 4740 - protein, 5 aa, synthetic construct
QNPLT

SEQ ID NO: 4741 - protein, 5 aa, synthetic construct
RDQKT

SEQ ID NO: 4742 - protein, 5 aa, synthetic construct
HNQQN

SEQ ID NO: 4743 - protein, 5 aa, synthetic construct
QWKRT

SEQ ID NO: 4744 - protein, 5 aa, synthetic construct
QNHQI

SEQ ID NO: 4745 - protein, 5 aa, synthetic construct
QNQQA

SEQ ID NO: 4746 - protein, 5 aa, synthetic construct
QNQLN

SEQ ID NO: 4747 - protein, 5 aa, synthetic construct
QTQPT

SEQ ID NO: 4748 - protein, 5 aa, synthetic construct
QKQLT

SEQ ID NO: 4749 - protein, 5 aa, synthetic construct
RNQLA

SEQ ID NO: 4750 - protein, 5 aa, synthetic construct
RNQQS

SEQ ID NO: 4751 - protein, 5 aa, synthetic construct
ISIQT

SEQ ID NO: 4752 - protein, 5 aa, synthetic construct
QNQQN

SEQ ID NO: 4753 - protein, 5 aa, synthetic construct
QSQQS

SEQ ID NO: 4754 - protein, 5 aa, synthetic construct
QTVCT

SEQ ID NO: 4755 - protein, 5 aa, synthetic construct
QYQQI

SEQ ID NO: 4756 - protein, 5 aa, synthetic construct
QQIMT

SEQ ID NO: 4757 - protein, 5 aa, synthetic construct
QNEQS

SEQ ID NO: 4758 - protein, 5 aa, synthetic construct
LNHQT

SEQ ID NO: 4759 - protein, 5 aa, synthetic construct
QMIHT

SEQ ID NO: 4760 - protein, 5 aa, synthetic construct
RNHQS

SEQ ID NO: 4761 - protein, 5 aa, synthetic construct
QKMNT

SEQ ID NO: 4762 - protein, 5 aa, synthetic construct
QSQQN

SEQ ID NO: 4763 - protein, 4 aa, synthetic construct
KSIY

SEQ ID NO: 4764 - protein, 4 aa, synthetic construct
KIIN

SEQ ID NO: 4765 - protein, 4 aa, synthetic construct
KAII

SEQ ID NO: 4766 - protein, 4 aa, synthetic construct
KAIS

SEQ ID NO: 4767 - protein, 4 aa, synthetic construct
KTVD

SEQ ID NO: 4768 - protein, 4 aa, synthetic construct
KTIE

SEQ ID NO: 4769 - protein, 4 aa, synthetic construct
KTIY

SEQ ID NO: 4770 - protein, 4 aa, synthetic construct
KNVV

SEQ ID NO: 4771 - protein, 4 aa, synthetic construct
KTDA

SEQ ID NO: 4772 - protein, 4 aa, synthetic construct
KTEM

SEQ ID NO: 4773 - protein, 4 aa, synthetic construct
KIVN

SEQ ID NO: 4774 - protein, 4 aa, synthetic construct
KIGN

SEQ ID NO: 4775 - protein, 4 aa, synthetic construct
KEVM

SEQ ID NO: 4776 - protein, 4 aa, synthetic construct
KYQV

SEQ ID NO: 4777 - protein, 4 aa, synthetic construct
KTVE

SEQ ID NO: 4778 - protein, 4 aa, synthetic construct
KAID

SEQ ID NO: 4779 - protein, 4 aa, synthetic construct
KTIM

SEQ ID NO: 4780 - protein, 4 aa, synthetic construct
KEVG

SEQ ID NO: 4781 - protein, 4 aa, synthetic construct
KSEM

SEQ ID NO: 4782 - protein, 4 aa, synthetic construct
KAQQ

SEQ ID NO: 4783 - protein, 4 aa, synthetic construct
KCGE

SEQ ID NO: 4784 - protein, 4 aa, synthetic construct
KASN

SEQ ID NO: 4785 - protein, 4 aa, synthetic construct
KTIG

SEQ ID NO: 4786 - protein, 4 aa, synthetic construct
KTDP

SEQ ID NO: 4787 - protein, 4 aa, synthetic construct
KELV

SEQ ID NO: 4788 - protein, 4 aa, synthetic construct
KELM

SEQ ID NO: 4789 - protein, 4 aa, synthetic construct
KNEI

SEQ ID NO: 4790 - protein, 4 aa, synthetic construct
KTPN

SEQ ID NO: 4791 - protein, 4 aa, synthetic construct
KITN

SEQ ID NO: 4792 - protein, 4 aa, synthetic construct
KTDI

SEQ ID NO: 4793 - protein, 4 aa, synthetic construct
KTDQ

SEQ ID NO: 4794 - protein, 4 aa, synthetic construct
KGIN

SEQ ID NO: 4795 - protein, 4 aa, synthetic construct
KSEI

SEQ ID NO: 4796 - protein, 4 aa, synthetic construct
KWSA

SEQ ID NO: 4797 - protein, 4 aa, synthetic construct
KELA

SEQ ID NO: 4798 - protein, 4 aa, synthetic construct
KQTQ

SEQ ID NO: 4799 - protein, 4 aa, synthetic construct
KGAD

SEQ ID NO: 4800 - protein, 4 aa, synthetic construct
KVGE

SEQ ID NO: 4801 - protein, 4 aa, synthetic construct
KANE

SEQ ID NO: 4802 - protein, 4 aa, synthetic construct
KTDT

SEQ ID NO: 4803 - protein, 4 aa, synthetic construct
KTCI

SEQ ID NO: 4804 - protein, 4 aa, synthetic construct
KELR

SEQ ID NO: 4805 - protein, 4 aa, synthetic construct
KCQI

SEQ ID NO: 4806 - protein, 4 aa, synthetic construct
KGVM

SEQ ID NO: 4807 - protein, 4 aa, synthetic construct
KACD

SEQ ID NO: 4808 - protein, 4 aa, synthetic construct
KNEL

SEQ ID NO: 4809 - protein, 4 aa, synthetic construct
KAAE

SEQ ID NO: 4810 - protein, 4 aa, synthetic construct
KGQN

SEQ ID NO: 4811 - protein, 4 aa, synthetic construct
KNEF

SEQ ID NO: 4812 - protein, 4 aa, synthetic construct
KTSI

SEQ ID NO: 4813 - protein, 4 aa, synthetic construct
KCDQ

SEQ ID NO: 4814 - protein, 4 aa, synthetic construct
KEIL

SEQ ID NO: 4815 - protein, 4 aa, synthetic construct
KTPD

SEQ ID NO: 4816 - protein, 4 aa, synthetic construct
SPHK

SEQ ID NO: 4817 - protein, 11 aa, synthetic construct
ERVSGSPHSKA

SEQ ID NO: 4818 - protein, 12 aa, synthetic construct
AEIGHDSPHKSG

SEQ ID NO: 4819 - protein, 11 aa, synthetic construct
ENVSGSPHSKA

SEQ ID NO: 4820 - DNA, 1537 bp, synthetic construct
  source 1..1537: mol_type = other DNA
ctgcgcgctcgctcgctcactgaggccgcccgggcaaagcccgggcgtcgggcgacctttggtcgcccggcctcagtgagcgagcgagcgcgcagagagggagtgtagccatgctctaggaagatcaattcaattcacgcgtccatggcttagaaggcaagaatcctggctgtggaaagatacctaaaggatcaacagctcctggggatttggggttgctctggaaaactcatttgcaccactgctgtgccttggaatgctagttggagtaataaatctctggaacagatttggaatcacacgacctggatggagtgggacagagaaattaacaattacacaagcttaatacactccttaattgaagaatcgcaaaaccagcaagaaaagaatgaacaagaattattggaattagataaatgggcaagtttgtggaattggtttaacataacaaattggctgtggtatataaaattattcataatgatagtaggaggcttggtaggtttaagaatagtttttgctgtactttctatagtgaatagagttaggcagggatattcaccattatcgtttcagacccacctcccaaccccgaggggacccgacaggcccgaaggaatagaagaagaaggtggagagagagacagagacagatccattcgattagtgaacggatctcgacggtatcgatcacgagactagcctcgagcggccgcaattcgaacgctgacgtcatcaacccgctccaaggaatcgcgggcccagtgtcactaggcgggaacacccagcgcgcgtgcgccctggcaggaagatggctgtgagggacagggagtggcgccctgcaatatttgcatgtcgctatgtgttctgggaaatcaccataaacgtgaaatgtctttggatttgggaatcttataagttctgtatgagaccacaccggtgaagcaaagaaggggcagagggagcccgtgagctgagtgggccagggactgggagaaggagtgaggaggcagggccggcatgcctctgctgctggccagaccccttaactcatttgttcccgtctgcacctgtcactagtaacagatgagttaaggggtttggccgtgtagtgctacccagcgctggctgcctcctcagcattgcaattcctctcccatctgggcaccagtcagctaccctggtgggaatctgggtagccctcgaggacggggtgaactacgcctgaggatccgatctttttccctctgccaaaaattatggggacatcatgaagccccttgagcatctgacttctggctaataaaggaaatttattttcattgcaatagtgtgttggaattttttgtgtctctcactcggcctaggtagataagtagcatggcgggttaatcattaactacaaggaacccctagtgatggagttggccactccctctctgcgcgctcgctcgctcactgaggccgggcgaccaaaggtcgcccgacgcccgggctttgcccgggcggcctcagtgagcgagcgagcgcgcag

SEQ ID NO: 4821 - RNA, 260 nt, synthetic construct
  source 1..260: mol_type = other RNA
gaagcaaagaaggggcagagggagcccgtgagctgagtgggccagggactgggagaaggagtgaggaggcagggccggcatgcctctgctgctggccagaccccttaactcatttgttcccgtctgcacctgtcactagtaacagatgagttaaggggtttggccgtgtagtgctacccagcgctggctgcctcctcagcattgcaattcctctcccatctgggcaccagtcagctaccctggtgggaatctgggtagcc

SEQ ID NO: 4822 - DNA, 465 bp, Macaca mulatta; identical to SEQ ID NO: 111
  source 1..465: mol_type = genomic DNA

SEQ ID NO: 4823-4999 - skipped (177 entries)

SEQ ID NO: 5000 - RNA, 30 nt, synthetic construct
  source 1..30: mol_type = other RNA
ctcccgcagaacaccatgcgctccacggaa

SEQ ID NO: 5001 - RNA, 100 nt, synthetic construct
  source 1..100: mol_type = other RNA
gaagcaaagaaggggcagagggagcccgtgagctgagtgggccagggactgggagaaggagtgaggaggcagggccggcatgcctctgctgctggccaga

SEQ ID NO: 5002 - RNA, 54 nt, synthetic construct
  source 1..54: mol_type = other RNA
gtgctgggcggggggcggcgggccctcccgcagaacaccatgcgctcttcggaa

SEQ ID NO: 5003 - RNA, 54 nt, synthetic construct
  source 1..54: mol_type = other RNA
gtgctgggcggggggcggcgggccctcccgcagaacaccatgcgctccacggaa

SEQ ID NO: 5004 - RNA, 15 nt, synthetic construct
  source 1..15: mol_type = other RNA
gtggccactgagaag

SEQ ID NO: 5005 - RNA, 18 nt, synthetic construct
  source 1..18: mol_type = other RNA
gtctgcacctgtcactag

SEQ ID NO: 5006 - RNA, 10 nt, synthetic construct
  source 1..10: mol_type = other RNA
tgtgacctgg

SEQ ID NO: 5007 - RNA, 10 nt, synthetic construct
  source 1..10: mol_type = other RNA
tgtgatttgg

SEQ ID NO: 5008 - RNA, 35 nt, synthetic construct
  source 1..35: mol_type = other RNA
ctgaggagcgccttgacagcagccatgggagggcc

SEQ ID NO: 5009 - RNA, 100 nt, synthetic construct
  source 1..100: mol_type = other RNA
tggccgtgtagtgctacccagcgctggctgcctcctcagcattgcaattcctctcccatctgggcaccagtcagctaccctggtgggaatctgggtagcc

SEQ ID NO: 5010 - RNA, 99 nt, synthetic construct
  source 1..99: mol_type = other RNA
ggccgtgtagtgctacccagcgctggctgcctcctcagcattgcaattcctctcccatctgggcaccagtcagctaccctggtgggaatctgggtagcc

SEQ ID NO: 5011 - RNA, 52 nt, synthetic construct
  source 1..52: mol_type = other RNA
ctgaggagcgccttgacagcagccatgggagggccgccccctacctcagtga

SEQ ID NO: 5012 - RNA, 52 nt, synthetic construct
  source 1..52: mol_type = other RNA
ctgtggagcgccttgacagcagccatgggagggccgccccctacctcagtga

SEQ ID NO: 5013 - RNA, 122 nt, synthetic construct
  source 1..122: mol_type = other RNA
ctcccgcagaacaccatgcgctccacggaagcaggtcctcactttaatgctgtggccactgagaagtattaaagtgaggacctgcttctgaggagcgccttgacagcagccatgggagggcc

SEQ ID NO: 5014 - DNA, 54 bp, synthetic construct
  source 1..54: mol_type = other DNA
gtgctgggcggggggcggcgggccctcccgcagaacaccatgcgctccacggaa

SEQ ID NO: 5015-5021 - skipped (7 entries)

SEQ ID NO: 5022 - DNA, 158 bp, synthetic construct
  source 1..158: mol_type = other DNA
gtgctgggcggggggcggcgggccctcccgcagaacaccatgcgctcttcggaacccttaactgatctgttaacctgtgacctggttaacagatgagttaagggttctgtggagcgccttgacagcagccatgggagggccgccccctacctcagtga

SEQ ID NO: 5023 - DNA, 21 bp, synthetic construct
  source 1..21: mol_type = other DNA
cccttaactgatctgttaacc

SEQ ID NO: 5024 - DNA, 21 bp, synthetic construct
  source 1..21: mol_type = other DNA
ttaacagatgagttaagggtt

SEQ ID NO: 5025-5245 - skipped (221 entries)

SEQ ID NO: 5246 - protein, 17 aa, synthetic construct
TINGSGSPHKYGQNQQT

SEQ ID NO: 5247-5659 - skipped (413 entries)

SEQ ID NO: 5660 - protein, 18 aa, synthetic construct
KTINGSGSPHSKAQNQQT

SEQ ID NO: 5661-5827 - skipped (167 entries)

SEQ ID NO: 5828 - protein, 18 aa, synthetic construct
KTINGHDSPHKSGQNQQT

SEQ ID NO: 5829-6400 - skipped (572 entries)

SEQ ID NO: 6401 - protein, 11 aa, synthetic construct
EKMSGSPHSKA

SEQ ID NO: 6402 - protein, 11 aa, synthetic construct
HDSPHSKAQNL

SEQ ID NO: 6403 - protein, 11 aa, synthetic construct
VNGHDSPHSKA

SEQ ID NO: 6404-6405 - skipped (2 entries)

SEQ ID NO: 6406 - protein, 8 aa, synthetic construct
GSGQNQQT